(19) United States
(12) Patent Application Publication
(10) Pub. No.: US 2026/0043083 A1
(43) Pub. Date: Feb. 12, 2026

(54) DNA-BARCODED ANTIGEN MULTIMERS AND METHODS OF USE THEREOF

(71) Applicant: BOARD OF REGENTS, THE UNIVERSITY OF TEXAS SYSTEM, Austin, TX (US)

(72) Inventors: Ning JIANG, Austin, TX (US); Shuqi ZHANG, Austin, TX (US); Keyue MA, Austin, TX (US); Chenfeng HE, Austin, TX (US); Alexandra A. SCHONNESEN, Austin, TX (US)

(21) Appl. No.: 19/279,809

(22) Filed: Jul. 24, 2025

Related U.S. Application Data
(62) Division of application No. 17/046,581, now abandoned.
(60) Provisional application No. 62/655,317, filed on Apr. 10, 2018.
(60) Provisional application No. 62/719,007, filed on Aug. 16, 2018.

(51) Int. Cl. C12Q 1/6881

(52) U.S. Cl. CPC C12Q 1/6881; C12Q 2531/113; C12Q 2563/185

(57) ABSTRACT

Provided herein are methods compositions and methods to generate pMHC libraries, and methods of using the pMHC libraries to determine the sequences of T cell receptors, and T cell developmental and activation status.

[0001] This application claims the benefit of U.S. Provisional Patent Application No. 62/655,317, filed Apr. 10, 2018 and No. 62/719,007, filed Aug. 16, 2018, which are both incorporated herein by reference in their entirety.

[0002] This invention was made with government support under Grant Nos. R00 AG040149, S10 OD020072, and R33 CA225539 awarded by the National Institutes of Health. The government has certain rights in the invention.

### SEQUENCE LISTING

[0003] A Sequence Listing conforming to the rules of WIPO Standard ST.25 is hereby incorporated by reference. Said Sequence Listing has been filed as an electronic document via PatentCenter in ASCII formatted text. The electronic document, created on Sep. 12, 2024, is entitled “093331-1414756_ST25_2.txt” and is 1,066,882 bytes in size.

### BACKGROUND

### 1. Field

[0004] The present disclosure relates generally to the field of immunology. More particularly, it concerns the generation of pMHC molecules and their use in detecting T cells.

### 2. Description of Related Art

[0005] Each CD8⁺ T cell can potentially recognize multiple species of peptides bound by Major Histocompatibility Complex (pMHC) Class I molecules on the surface of most nucleated cells using a distinct TCR. This TCR-mediated reactivity and cross-reactivity affects the quality of the immune response in viral infection (Mongkolsapaya et al., 2003), auto-immune diseases (Lang et al., 2002), and cancer immunotherapy (Cameron et al., 2013). Thus, the ability to identify the antigenic peptide or peptides recognized by a T cell and its T cell receptor (TCR) sequence is essential for the monitor and treatment of immune-related diseases.

[0006] Fluorescent pMHC tetramers are widely used to identify antigen-binding T cells (Newell and Davis, 2014). While combinatorial tetramer staining can expand the number of peptides that can be interrogated, fluorescence spectral overlapping limits the number of peptides that can be examined at a time, not to mention the extent of cross-reactivity (Newell and Davis, 2014). Using isotope-labeled pMHC tetramers, mass cytometry, such as by CyTOF® (Fluidigm®), can interrogate an even larger number of peptides; however, examining cross-reactivity has not been demonstrated. Furthermore, the destructive nature of CyTOF® prohibits linking of pMHCs bound by a T cell to its TCR sequence (Newell and Davis, 2014).

[0007] DNA-barcoded pMHC multimer technology has been used for the bulk analysis of antigen-binding T cell frequencies for more than 1000 pMHCs (Bentzen et al., 2016). However, with bulk analysis, information on the binding of peptides to individual T cells is lost and cross-reactivity cannot be assessed at single cell level, which limits the assessment of cross-reactivity in primary T cells, such as T cells in clinical samples. It also remains challenging to link peptides with the individual TCR sequences that they bind to for a large number of peptides in hundreds of single T cells simultaneously. This information is valuable for tracking antigen-specific T cell lineages in disease settings, TCR-based therapeutics development (Strønen et al., 2016), and for uncovering patterns in TCR recognition (Glanville et al., 2017). One further limitation of current multimer-based methods is that while the peptide library size can be scaled up, each peptide must still be chemically synthesized for each pMHC species (Rodenko et al., 2006). The high cost associated with chemically synthesized peptides prevents the quick generation of a pMHC library that can be tailored to any pathogen or disease. Clearly, there exists a need for methods to quickly and cost effectively generate pMHC libraries to investigate T cells.

### SUMMARY

[0008] In some embodiments, the present disclosure provides compositions and methods to generate DNA barcode labeled pMHC or peptide antigen multimer libraries for hundreds or thousands of peptides, and methods of using the pMHC or peptide antigen multimer libraries to determine the following linked information at single cell level for individual T or B cells: sequences of T or B cell receptors, antigen specificity, T or B cell transcriptomic or gene expression level, and proteogenomics by the expression level of protein markers inside or on the surface of T or B cells at single cell level for individual T or B cells. This linked information is then used to assess T or B cell developmental, activation status, clonal expansion status, phenotype, antigen specificity, and funcation in different physiological or pathological conditions, such as infection, vaccination, allergy, autoimmune diseases, cancer, aging, and neurodegenerative diseases. TCR or BCR sequences and antigen sequences can be used as therapeutics in difference diseases or vaccine. The status of T or B cell developmental, activation status, clonal expansion status, phenotype, antigen specificity, and funcation can be used for immune profiling, disease early diagnosis, therapeutics development, prognosis, treatment progress monitoring, and treatment responder or non-responder separation.

[0009] In some embodiments, the present disclosure provides compositions and methods to generate pMHC libraries, and methods of using the pMHC libraries to determine the sequences of T cell receptors, and T cell developmental and activation status.

[0010] In a first embodiment, there is provided a composition comprising multimer backbone linked to a peptide-encoding oligonucleotide.

[0011] In some aspects, the multimer backbone comprises 2, 3, 4, 5, 6, 7, 8, 9, 10, or more protein subunits. In particular aspects, the multimer backbone is a dimerization antibody, engineered antibody Fab′ or similar construct that binds to a universal moiety either on a peptide or pMHC, such as the FLAG portion of the peptide or biotin, to dimerize antigens. In certain aspects, the multimer backbone is a tetramer formed by streptavidin or other similar proteins. In some aspects, the multimer backbone is a pentamer, octamer, streptamer (e.g., formed by STREP-TAG®), or dodecamer (e.g., formed by tetramerized streptavidin). In some aspects, the protein subunits comprise streptavidin or a glucan. In certain aspects, the glucan is dextran.

[0012] In certain aspects, the peptide-encoding oligonucleotide is further linked to a DNA handle. In some aspects, the peptide-encoding oligonucleotide is linked to the DNA handle by annealing and PCR. In some aspects, the peptide-encoding oligonucleotide is linked to the DNA handle by annealing without PCR. In some aspects, the DNA handle is an oligonucleotide comprising a first sequencing primer and a barcode. In some aspects, the barcode comprises a 8-20, such as 10-14, such as 8, 9, 10, 11, 12, 13, 14, 15, 16, 17, 18, 19, or 20, base pair degenerate sequence. In some aspects, the degenerate sequence has one or more fixed nucleotides in the middle. In particular aspects, the barcode comprises a 12 base pair degenerate sequence. In some aspects, the DNA handle further comprises a specific nucleotide sequence whose corresponding amino acid sequence can be recognized by certain proteases, such as partial FLAG (DDDDK), IEGR, or IDGR. In some aspects, the nucleotide sequence, whose amino acid sequence is recognized by proteases starts with ATG. In some aspects, the peptide-encoding oligonucleotide is further linked to a second sequencing primer.

[0013] In certain aspects, the DNA handle is linked to the multimer backbone. In some aspects, DNA barcodes denoting each type of pMHC multimer are annealed. In certain aspects, the annealing is followed by PCR. In particular aspects, each type of the pMHC multimer in the final pool has a similar DNA:multimer backbone ratio. In some aspects, the ratio of the DNA handle to multimer backbone is between 0.1:1 to 20:1, such as 0.1:1 to 1:1, 1:1 to 2:1, 2:1 to 3:1, 3:1 to 4:1, 4:1 to 5:1, 5:1 to 6:1, 6:1 to 7:1, 7:1 to 8:1, 8:1 to 9:1, 9:1 to 10:1, 10:1 to 11:1, 11:1 to 12:1, 12:1 to 13:1, 13:1 to 14:1, 14:1 to 15:1, 15:1 to 16:1, 16:1 to 17:1, 17:1 to 18:1, 18:1 to 19:1, or 19:1 to 20:1.

[0014] In some aspects, the multimer backbone is further linked to one or more detectable moieties. In particular aspects, the one or more detectable moieties comprise the barcode in the DNA handle and/or a fluorophore. In some aspects, the DNA handle or peptide-encoding oligonucleotide is linked to the detectable label. In certain aspects, the DNA handle is covalently linked to the detectable label. In particular aspects, the covalent link is a HyNic-4FB crosslink, Tetrazine-TCO crosslink, or other crosslinking chemistries. In certain aspects, the detectable moieties are attached to the multimer backbone or to the peptide-encoding oligonucleotide. In some aspects, the one or more detectable moieties are fluorophores. In some aspects, the fluorophore is a PE, PE-Cy5, PE-Cy7, APC, APC-Cy7, QDOT©565, QDOT® 605, QDOT® 655, QDOT® 705, Brilliant Violet (BV) 421, BV 605, BV 510, BV 711, BV786, PerCP, PerCP/Cy5.5, Alexa Fluor® 488, Alexa Fluor® 647, FITC, BV570, BV650, DYLIGHT® 488, DYLIGHT® 649, and/or PE/DAZZLE® 594. In particular aspects, the fluorophores are R-phycoerythrin (PE) and allophycocyani (APC).

[0015] In certain aspects, the composition further comprises at least two peptide-major histocompatibility complex (pMHC) monomers linked to the multimer backbone. In some aspects, the composition comprises between 2 and 12, such as 2, 3, 4, 5, 6, 7, 8, 9, 10, 11, or 12, pMHC monomers.

[0016] In some aspects, the peptide-encoding oligonucleotide encodes a peptide identical to the peptide of the pMHC monomers. In some aspects, the peptide-encoding oligonucleotide comprises DNA. In certain aspects, the peptide-encoding oligonucleotide further comprises a 5′ primer region and/or a 3′ primer region.

[0017] In some aspects, the sequence of the DNA handle is constant and the sequence of the peptide-encoding oligonucleotide is variable.

[0018] In certain aspects, the pMHC monomers are biotinylated. In some aspects, the pMHC monomers are attached to the streptavidin by streptavidin-biotin interaction.

[0019] In some aspects, the composition comprises a pMHC tetramer. In other aspects, the composition comprises a pMHC pentamer.

[0020] In another embodiment, there is provided a method for generating a DNA-barcoded pMHC multimer comprising performing in vitro transcription/translation (IVTT) on a peptide-encoding oligonucleotide comprising a DNA handle, thereby obtaining the target peptide antigens; loading the peptides onto MHC monomers to produce pMHC monomers; and binding the pMHC monomers to a multimer backbone linked to a oligonucleotide comprising a DNA handle that peptide encoding oligonucleotides can use to attach or extend themselvese to the multimer backbone, thereby obtaining the DNA-barcoded pMHC multimer. In particular aspects, the DNA-barcoded multimer is a multimer of the composition of any of the above embodiments or aspects thereof. In some aspects, the MHC monomers are biotinylated. In certain aspects, the multimer backbone comprises streptavidin or streptamer. In some aspects, the multimer backbone comprises dextran. In some aspects, the DNA-barcoded fluorescent pMHC multimer is further defined as a DNA-barcoded fluorescent pMHC multimer. In some aspects, the DNA-barcoded pMHC multimer is further defined as a DNA-barcoded pMHC tetramer, pentamer, octamer, or dodecamer.

[0021] In some aspects, the method further comprises amplifying the peptide-encoding DNA oligonucleotide by PCR to add IVTT adaptors to the peptide-encoding oligonucleotide prior to performing IVTT. In some aspects, the DNA handle is an oligonucleotide comprising a first sequencing primer, a barcode, and a partial FLAG sequence. In particular aspects, the DNA handle has a constant sequence and the peptide-encoding oligonucleotide has a variable sequence. In particular aspects, the barcode comprises a 12 base pair degenerate sequence.

[0022] In some aspects, the peptide-encoding DNA oligonucleotide comprises a partial FLAG peptide at the N-terminus. In specific aspects, the partial FLAG peptide is cleaved by enterokinase after performing IVTT.

[0023] In some aspects, the peptide-encoding DNA oligonucleotide comprises a IEGR or IDGR at the N-terminus. In specific aspects, the IEGR or IDGR peptide is cleaved by factor Xa after performing IVTT.

[0024] In certain aspects, loading comprises contacting the target peptide library with MHC monomers comprising UV-cleavable temporary peptides and applying UV light to exchange the temporary peptides with the library peptides. In some aspects, loading comprises contacting the target peptide library with MHC monomers comprising non-library peptides and chemically exchanging the peptides to generate pMHC monomers. In some aspects, loading comprises unfolding the MHC monomers to release non-target peptides, contacting the unfolded MHC monomers with the target peptide library, and refolding the MHC monomers with the target peptide library to generate the pMHC monomers. In certain aspects, loading comprises contacting the MHC monomers with the target peptide library and performing CLIP peptide exchange to generate pMHC monomers. In certain aspects, loading comprises contacting the target peptide library with MHC monomers comprising temperature-sensitive temporary peptides and applying a different temperature to exchange the temporary peptides with the library peptides.

[0025] In some aspects, the DNA-barcoded pMHC or peptide multimer further comprises one or more detectable moieties. In certain aspects, the one or more detectable moieties are fluorophores. In some aspects, the fluorophores are PE, PE-Cy5, PE-Cy7, APC, APC-Cy7, QDOT® 565, QDOT® 605, QDOT® 655, QDOT® 705, Brilliant Violet (BV) 421, BV 605, BV 510, BV 711, BV786, PerCP, PerCP/Cy5.5, Alexa Fluor® 488, Alexa Fluor® 647, FITC, BV570, BV650, DYLIGHT® 488, DYLIGHT® 649, and/or PE/DAZZLE® 594. In particular aspects, the fluorophores are R-phycoerythrin (PE) and/or allophycocyani (APC).

[0026] In certain aspects, the barcoded peptide-encoding DNA oligonucleotide is generated by annealing the peptide-encoding oligonucleotide of step (a) to a linker oligonucleotide comprising a (1) region complementary to the peptide-encoding DNA oligonucleotide, (2) a barcode, and (3) a 5′ primer region and performing overlap extension. In particular aspects, the barcode is a 12 base pair degenerate sequence. In some aspects, the region complementary to the peptide-encoding DNA oligonucleotide is a partial FLAG sequence. In certain aspects, the linker oligonucleotide further comprises at least one spacer. In some aspects, the spacer is a C12 spacer and/or C18 spacer. In some aspects, the linker oligonucleotide comprises 2 spacers. In some aspects, the linker oligonucleotide further comprises an amine group. In certain aspects, the linker oligonucleotide is linked to the polymer conjugate by a covalent linkage. In particular aspects, the linker oligonucleotide is linked to the polymer conjugate by a HyNic-4FB linkage.

[0027] In another embodiment there is provided a method of generating a library of DNA-barcoded pMHC or peptide multimers comprising performing the method of any of the present embodiments by using a plurality of peptide-encoding DNA oligonucleotides. In some aspects, the peptide of each pMHC or peptide monomer is identical to a peptide encoded by the barcoded peptide-encoding DNA oligonucleotide linked to streptavidin for each DNA-barcoded pMHC multimer. In other aspects, the peptide of each pMHC or peptide monomer is different to a peptide encoded by the barcoded peptide-encoding DNA oligonucleotide linked to streptavidin for each DNA-barcoded pMHC multimer. Further provided herein is a DNA-barcoded pMHC multimer library produced by the method of the present embodiments.

[0028] In a further embodiment, there is provided a method for determining the specificity of T cell receptors (TCRs) or B cell receptor (BCR) comprising staining a plurality of T or B cells with a library of DNA-barcoded pMHC or peptide multimers of the embodiments, thereby generating pMHC multimer-bound T cells or peptide multimer-bound B cells; sorting the pMHC multimer-bound T cells or peptide multimer-bound B cells; sequencing the DNA barcode of each pMHC multimer or peptide multimer and the TCR or BCR sequences of the T or B cell bound to said pMHC multimer; and determining the copy number of each DNA-barcoded pMHC multimer bound to the corresponding T cell to determine the TCR specificity.

[0029] In another embodiment, there is provided a method for linking precursor T or B cells to their specific antigens comprising staining a plurality of T or B cells with a library of DNA-barcoded pMHC or peptide multimers of the embodiments, thereby generating pMHC multimer-bound T cells or peptide multimer-bound B cells; sorting the pMHC multimer-bound T cells or peptide multimer-bound B cells; sequencing the DNA barcode of each pMHC or peptide multimer and the TCR or BCR sequences of the T or B cell bound to said pMHC multimer; and determining the copy number of each DNA-barcoded pMHC multimer bound to the corresponding T or B cell to determine the antigen type and the TCR or BCR sequences linked to the antigen.

[0030] In some aspects of the above embodiments, the method may further comprise using the TCR sequences to determine the frequency of T cells for one or more of the target antigens in the DNA-barcoded pMHC or peptide multimer library. In some aspects, the copy number is determined by counting the number of copies of each unique barcode.

[0031] In certain aspects of the embodiments, the sorting comprises performing flow cytometry. In some aspects, flow cytometry uses a fluorophore attached to the pMHC multimer. In certain aspects, the sorting comprises separating tetramer bound T cells from unbound T cells or a sub-population of T cells. In some aspects, separating comprises using flow cytometry or using magnetically labeled antibodies or streptavidin. In certain aspects, sorting is further defined as separating each DNA-barcoded pMHC multimer-bound T cell or peptide multimer-bound B cell into a separate reaction container. In some aspects, the reaction container is a 96-well or 384-well plate. In some aspects, sorting is further defined as separating each DNA-barcoded pMHC multimer-bound T cell or peptide multimer-bound B cell in bulk. In some aspects, the cells are sorted in bulk and dispersed to the reaction container, such as a microwell plate.

[0032] In some aspects of the embodiment, the peptide-encoding oligonucleotide and DNA handle attached to the pMHC-multimer or peptide multimer form a double-stranded DNA with a 3′ polyA overhang. In some aspects of the embodiment, the peptide-encoding oligonucleotide and DNA handle attached to the pMHC-multimer or peptide multimer form a double-stranded DNA without a 3′ polyA overhang. In some aspects, sequencing comprises preparing DNA-sequencing libraries comprising at least one amplification step wherein the primer pair is used to amplify the DNA barcode of the pMHC multimer and a different primer set is used to amplify the TCRα and TCRβ sequences of each T cell. In certain aspects, a set of reverse transcription primers are used to synthesize cDNA from TCRα and TCRβ sequences of each T cell before PCR amplification. In some aspects, preparing DNA-sequencing libraries comprises nested PCR of the DNA barcodes and TCRα and TCRβ sequences of each corresponding T cell. In certain aspects, the primers used in the amplification of the DNA barcode of the pMHC multimer and the TCRα and TCRβ sequences of each corresponding T cell comprise cellular barcodes.

[0033] In certain aspects, determining TCR or BCR specificity of each T or B cell further comprises associating the TCRα and TCRβ or BCR heavy and BCR light chain sequences of the T or B cell with the count of each DNA-barcoded pMHC or peptide multimer that was bound to said T or B cell. In some aspects, the count of each DNA-barcoded pMHC multimer that was bound to said T or B cell comprises subtracting a count of irrelevant pMHC or peptide multimers bound to the T or B cell from the number of each DNA-barcoded pMHC or peptide multimers bound to the T or B cell. In certain aspects, the count of each DNA-barcoded pMHC or peptide multimer that was bound to said T or B cell comprises subtracting a count of each DNA-barcoded pMHC or peptide multimers bound to an irrelevant T or B cell clone from the count of each DNA-barcoded pMHC or peptide multimers from the T or B cell of interest. In some aspects, the count of each DNA-barcoded pMHC or peptide multimer that was bound to said T or B cell comprises subtracting a count of a DNA-barcoded MHC or peptide multimer lacking an exchanged peptide bound to the T or B cell from the count of each DNA-barcoded pMHC or peptide multimer bound to the T or B cell. In certain aspects, the count of each DNA-barcoded pMHC or peptide multimer that was bound to said T or B cell comprises generating a ratio of the MID sequences of the last suspected true binding DNA-barcoded pMHC or peptide multimer and the first suspected false binding DNA-barcoded pMHC or peptide multimer and dividing all DNA-barcoded pMHC or peptide multimers by that ratio.

[0034] In another embodiment, there is provided a method for identifying neoantigen-specific TCRs or BCRs comprising staining a plurality of T cells with a library of DNA-barcoded pMHC or peptide multimers of the embodiments, wherein the library comprises DNA-barcoded pMHC or peptide multimers, wherein the peptides in the DNA-barcoded pMHC or peptide multimer comprise a set of neoantigen peptides and/or a set of wild-type antigen peptides; sorting the T or B cells bound to the DNA-barcoded pMHC or peptide multimers; sequencing the barcodes of the DNA-barcoded pMHC or peptide multimers and the TCRs or BCRs of the corresponding T or B cell; and sorting fluorophores that are only specific to neo-antigen DNA-barcoded pMHC or peptide multimers to identify neoantigen-specific TCRs or BCRs. In some aspects, the peptide is a cancer germline antigen-derived peptide, tumor-associated antigen-derived peptides, viral peptide, microbial peptide, human self protein-derived peptide or other non-peptide T or B cell antigen.

[0035] In some aspects, the peptides in the DNA-barcoded pMHC or peptide multimers comprise a set of neoantigen peptides. In certain aspects, the peptides in the DNA-barcoded pMHC or peptide multimer comprise a set of wild-type antigen peptides. In some aspects, the peptides in the DNA-barcoded pMHC or peptide multimer comprise a set of neo-antigen peptides and a set of wild-type antigen peptides.

[0036] In some aspects, the set of neo-antigen peptides comprise a fluorophore attached to the multimer backbone and the set of wild-type antigen peptides comprise a fluorophore attached to the multimer backbone. In certain aspects, the fluorophore for the neo-antigen peptides is the same as the fluorophore for the wild-type antigen peptides. In some aspects, the fluorophore for the neo-antigen peptides is different from the fluorophore for the wild-type antigen peptides.

[0037] In some aspects, sequencing determines if the T or B cell bound only to the neo-antigen peptide, only to the wild-type antigen peptide, or to both the neo-antigen and wild-type peptides. In some aspects, if the T or B cell only bound the neo-antigen peptide, then the TCR or BCR is neoantigen-specific. In certain aspects, sorting comprises flow cytometry using fluorophore intensity of a fluorophore attached to the pMHC multimer. In some aspects, the sorting comprises separating multimer bound T cells from unbound Tor B cells or a sub-population of T or B cells. In some aspects, separating comprises using magnetically labeled antibodies or streptavidin. In some aspects, sorting is further defined as separating each DNA-barcoded pMHC or peptide multimer-bound T or B cell into a separate reaction container or in bulk. In some aspects, the reaction container is a 96-well, 384-well plate or other tubes.

[0038] In some aspects, the method further comprises repeating the steps over the course of immune therapy to monitor response to therapy. In certain aspects, the method further comprises determining a subject's immune system status and administering treatment. In some aspects, the method further comprises determining the presence of infection, monitoring immune status, and administering treatment to a subject. In some aspects, the method further comprises determining response to a vaccine. In certain aspects, the method further comprises determining the auto-antigen in an autoimmune subject and monitoring response to treatment. In some aspects, the method further comprises generating neoantigen-specific T or B cells using the identified neoantigen-specific TCRs or BCRs.

[0039] Further provided herein is a composition comprising the neoantigen-specific T cells produced by the present embodiments. Further provided is a method of treating cancer in a subject comprising administering an effective amount of the composition of the embodiments to the subject.

[0040] In another embodiment, there is provided a method for identifying antigen cross-reactivity in naïve and/or non-naïve T or B cells comprising obtaining a plurality of neoantigen- and wild type antigen-presenting of DNA-barcoded pMHC or peptide multimers of the embodiments, wherein the neoantigen-presenting DNA-barcoded pMHC or peptide multimers comprise a first fluorophore and the wild-type antigen-presenting DNA-barcoded pMHC or peptide multimers comprise a second fluorophore; staining naïve and/or non-naive T or B cells with a plurality of pMHC or peptide multimers to generate pMHC multimer-T cell complexes or peptide-multimer-B cell complexes; sorting the pMHC multimer-T cells complexes or peptide-multimer-B cell complexes; determining the TCR or BCR sequences for all sorted T or B cells; and sequencing the barcodes of the DNA-barcoded pMHC or peptide multimers and the TCRs or BCRs of the corresponding T cell which bound to the T or B cell to determine if the T or B cell only bound to the neo-antigen pMHC or peptide multimer, only the wild-type antigen pMHC or peptide multimer, or both neo-antigen and wild-type pMHC or peptide multimers, thereby identifying neo-antigens that only induce neo-antigen specific TCRs and do not induce cross-reactive TCRs or BCRs. All of these analysis can be performed on individual patients while waiting for analysis results to inform on treatment option or other medical decision as the use of IVTT allows for the quick generation of the pMHC or peptide library.

[0041] In some aspects, the first fluorophore and the second fluorophore are the same. In other aspects, the first fluorophore and the second fluorophore are different. In some aspects, the sorting is based on fluorescence intensity. In certain aspects, sorting comprises flow cytometry using fluorophore intensity of a fluorophore attached to the pMHC or peptide multimer. In some aspects, the sorting comprises separating multimer bound T or B cells from unbound T or B cells or a sub-population of T or B cells. In some aspects, separating comprises using magnetically labeled antibodies or streptavidin. In some aspects, sorting is further defined as separating each DNA-barcoded pMHC multimer-bound T cell or DNA-barcoded peptide multimer-bound B cell into a separate reaction container or in bulk. In some aspects, the reaction container is a 96-well, 384-well plate or other tubes.

[0042] In some aspects, the method further comprises repeating the steps over the course of immune therapy to monitor response to therapy. In certain aspects, the method further comprises determining a subject's immune system status and administering treatment. In some aspects, the method further comprises determining the presence of infection, monitoring immune status, and administering treatment to a subject. In some aspects, the method further comprises determining response to a vaccine. In certain aspects, the method further comprises determining the auto-antigen in an autoimmune subject and monitoring response to treatment. generating neoantigen-specific T or B cells using the identified neoantigen-specific TCRs or BCRs.

[0043] In a further embodiment, there is provided a method for preparing DNA that is complementary to a target nucleic acid molecule comprising hybridizing a first strand synthesis primer to said target nucleic acid molecule; synthesizing the first strand of the complementary DNA molecule by extension of the first strand synthesis primer using a polymerase with template switching activity; hybridizing a template switching oligonucleotide to a 3′ overhang generated by the polymerase, wherein the template switching oligonucleotide comprises a restriction endonuclease site; extending the first strand of the complementary DNA molecule using the template switching oligonucleotide as the template, thereby generating the first strand of the complementary DNA molecule which is complementary to the target nucleic acid molecule and the template switching oligonucleotide; and amplifying the complementary DNA molecule.

[0044] In some aspects, the first strand synthesis primer comprises a cellular barcode. In some aspects, the first strand synthesis primer comprises or consists of sequences in Table 1. In some aspects, the restriction endonuclease site is a SalI site. In certain aspects, the template switching oligo comprises the sequence of sequences in Table 1. In some aspects, the target nucleic acid molecule is a plurality of target nucleic acid molecules. In certain aspects, the target nucleic acid molecule is RNA, such as mRNA or total RNA. In some aspects, the polymerase with template switching activity and strand displacement is a RNA dependent DNA polymerase. In certain aspects, the polymerase is a PrimeScript reverse transcriptase, M-MuLV reverse transcriptase, SmartScribe reverse transcriptase, Maxima H Minus Reverse Transcriptase, or Superscript II reverse transcriptase. In some aspects, the target nucleic acid molecule is DNA.

[0045] In additional aspects, the method further comprises cleaving the amplified complementary DNA molecules. In some aspects, the method further comprises preparing a sequencing library from the cleaved complementary DNA molecules. In certain aspects, the further comprises adding sequencing adaptors. In some aspects, preparing a sequencing library comprises the use of a Tn5 transposase to add sequencing adaptors. In certain aspects, the sequencing adaptors comprise the sequences depicted in Table 1. In some aspects, preparing a sequencing library comprises the use of custom primers. In some aspects, the custom primers have the sequences depicted in Table 1.

[0046] Further provided herein is a method for analyzing a genome or gene expression comprising preparing a sequencing library by the method of the embodiments, and sequencing the library.

[0047] In another embodiment, there is provided a method for analyzing a gene expression from a single cell comprising providing a single cell; lysing the single cell; preparing a sequencing library by the method of the embodiments, wherein the target nucleic acid is total RNA from the single cell; and sequencing the library. In some aspects, the single cell is a human cell. In certain aspects, the single cell is an immune effector cell. In some aspects, the single cell is a T cell. In some aspects, the single cell is provided by FACS, micropipette picking, or dilution.

[0048] In yet another embodiment, there is provided a method for analyzing gene expression from a plurality of single cells comprising providing a plurality of single cells; staining the plurality of single cells with a plurality of pMHC or peptide multimers prepared by the method of the embodiments; sorting the stained single cells into individual reservoirs; lysing the single cells; concurrently preparing complementary DNA by the method of claim 117 for each of the lysed single cells; cleaving the restriction site of the complementary DNAs; pooling the cleaved complementary DNA of each of the single cells; preparing sequencing libraries from the pooled cleaved complementary DNA; and sequencing the libraries. In some aspects, the single cells are T or B cells. In certain aspects, the T or B cells are naïve T or B cells. In some aspects, the T or B cells are neoantigen binding T or B cells. In some aspects, the method further comprises performing the method of claim 89 for identifying neoantigen-specific TCRs or BCRs. In some aspects, the method is performed in high-throughput by using microdroplet methods, in-drop method, or microwell methods.

[0049] In further embodiments, there are provided additional methods in combination with any of the above embodiments. The above methods provided herein may be used to detect self-antigen specific T or B cells, wherein the self-antigen specific T or B cells cause severe adverse effect after immune checkpoint blockade therapy and other cancer immunotherapy, before a subject is administered a therapy. Also provided herein is a method of detecting T or B cell binding epitopes and further developing the T or B cell binding epitopes into vaccines or TCR or BCR redirected adoptive T or B cell therapy for any pathogens. Further, some embodiments provide a method of using common pathogen and auto-immune disease associated epitopes identified according to the present methods to test and monitor the immune health of individuals and predict individual's protective capacity to infection or likelihood of developing auto-immune diseases and monitoring the early on-set of auto-immune diseases. In addition, there is provided a method of detecting regulatory T or B cell binding epitopes according to the present methods and developing vaccines to eliminate or enhance regulator T or B cell function or number for immunological diseases.

[0050] In further embodiment, there is provided a method for analyzing T or B cell antigen specificity in combination with analyzing TCR or BCR sequences, gene expression and proteogenomics from a single cell comprising generating peptides according to the present embodiments; generating DNA-barcoded pMHC or peptide multimers of the embodiments; staining T or B cells with pMHC or peptide multimer library thereby generating pMHC or peptide multimer-bound T or B cells; sorting the pMHC multimer-bound T cells; sorting the peptide multimer-bound B cells; sequencing the DNA barcode of each pMHC or peptide multimer, the TCR TCR sequences, gene expression and proteogenomics of the T or B cell bound to said pMHC multimer; and determining the copy number of each DNA-barcoded pMHC or peptide multimer bound to the corresponding T or B cell to determine the TCR or BCR specificity.

[0051] In certain aspects, the peptide-encoding oligonucleotide is linked to the DNA handle by annealing. In some aspects, the DNA handle is an oligonucleotide comprising a first universal primer and a specific nucleotide sequence, whose corresponding amino acid sequence can be recognized by certain proteases, such as partial FLAG (DDDDK), IEGR, IDGR. In some aspects, the nucleotide sequence, whose amino acid sequence are recognized by proteases starts with ATG. In some aspects, the peptide-encoding oligonucleotide comprises a partial FLAG, IEGR or IDGR peptide at the N-terminus. In some aspects, the peptide-encoding DNA oligonucleotide is further linked to a second sequencing primer. In some aspects, the peptide-encoding oligonueclotide further comprises a polyA sequence with a length ranging from 18-30, such as 18, 19, 20, 21, 22, 23, 24, 25, 26, 27, 28, 29, or 30 base pairs. In certain aspects, the last 2-4 polyA nucleotides, such as 2, 3, or 4 nucleotides are bound by phosphothioate bonds. In certain aspects, the DNA handle is linked to the multimer backbone.

[0052] In certain aspects, the peptide-encoding oligonucleotide can be substituted with random generated oligonucleotides. Random generated oligonucleotides can comprise a partial FLAG, IEGR or IDGR peptide at the N-terminus, a random generated oligonucleotide barcode between 8-30 bp, such as 8, 9, 10, 11, 12, 13, 14, 15, 16, 17, 18, 19, 20, 21, 22, 23, 24, 25, 26, 27, 28, 29 or 30 base pairs, and a polyA sequence with a length ranging from 18-30, such as 18, 19, 20, 21, 22, 23, 24, 25, 26, 27, 28, 29, or 30 base pairs. In certain aspects, the last 2-4 polyA nucleotides, such as 2, 3, or 4 nucleotides are bound by phosphothioate bonds. In certain aspects, the DNA handle is linked to the multimer backbone.

[0053] In another embodiment, there is provided a method for the use of any of the present embodiments with single cell gene expression analysis platforms. In some aspects, the platform is the BD RHAPSODY™ Single-Cell Analysis System, or single cell RNA sequencing (scRNA-seq) platforms, such as lOX genomics CHROMIUM®, 1CELLBIO® INDROP® or Dolomite Bio Nadia. In some aspects, the method is combined with DNA-labeled antibody sequencing, such as CITE-seq or REAP-seq or commercially available DNA-labeled antibodies, such as BD Ab-seq products or BIOLEGEND® TotalSeq.

[0054] The present method including the TetTCR-Seq, single cell gene expression or scRNA-seq, and DNA-labeled antibody sequencing is referred to herein as TetTCR-SeqHD. TetTCR-SeqHD can use peptide or antigen encoding oligonucleotides with poly A tail or random oligonucleotides with poly A tail barcoding antigen speicficity added to the 3′end to interface with scRNA-seq protocols that high-throughput scRNA-seq platforms use. In some aspects, the DNA linker oligonucleotide or DNA handle is covalentely linked to streptavidin in order to complementary bind peptide-encoding DNA oligonucleotide or random oligonucleotide barcoding antigen speicficity. In some aspects, the method only comprises annealing to link the peptide-encoding DNA oligonucleotide to the streptavidin. MID or UMI and cell barcodes from high-throught platforms during reverse transcription may be used. Reverse transcription using primers containing polyT in the above single cell analysis platforms can generate cDNA of peptide-encoding DNA oligonucleotide for each individual cell.

[0055] In some aspects, the proteinase is not limited to enterokinatse, enteropeptidase or factor Xa. Any enzyme with a specific cleaveage site and the peptides encoding the cleaveage site can be used here to construct the DNA handle or liner sequences and paired with that enzyme in generating peptides.

[0056] In particular aspectrs, the reverse transcription part of TetTCR-SeqHD is compatible with single cell RNA sequencing protocols, such as SMART-SEQ® and SMART-SEQ2® protocols. In certain aspects, amplification of the peptide or antigen encoding oligos with poly A tail or random oligonucleotide with poly A tail barcoding antigen specificity is accomplished using the single cell gene expression analysis platforms or single cell RNA sequencing protocols, such as SMART-SEQ® and SMART-SEQ2© protocols or by adding a primer that anneals to the 5′ end of the peptide or antigen encoding oligos with poly A tail or random oligonucleotide with poly A tail barcoding antigen specificity.

[0057] Further provided herein is a method to generate a set of peptides using oligonucleotides that encode the peptides but without a polyA tail by using a separate set of random barcoded oligonucleotides with a long poly A tail to covalently attach to a multimer backbone via a DNA linker or handle. The random barcoded oligonucleotides with poly A tail can be used in the reverse transcription. This set of random barcoded oligonucleotides with poly A tail can be re-used between cohort of samples or patients while only changing the short oligonucleotides that encode peptide to match specific antigens one wants to test in the sample or neo-antigens identified in individual patients.

[0058] In some aspects of any of the above embodiments, the methods comprise reading of the antigen specificity by qPCR without performing sequencing. This method can be applied to a set of pre-defined oligonucleotides that are used to denote peptide antigens.

[0059] In a further embodiment, there is provided a method comprising reading antigen specificity by qPCR without performing sequencing in combination the with above embodiments.

[0060] In another embodiment, there is provided a method to determine whether predicted cancer antigens or foreign antigens or self-antigens are presented by MHC on cancer cells or virally infected host cells or host cells comprising generating a pMHC multimer library by according to the embodiments; using the pMHC multimer library to identify polyclonal T cells from patients or healthy individuals to culture; expanding polyclonal T cell culture and exposing the T cells to either cancer cells, virally infected cells or host cells to be activated by antigens presented by their MHC molecules; and performing TetTCR-Seq or TetTCR-SeqHD to examine the antigen specificity and activation status at single T cell level to determine which antigen-recognizing T cells have been activated, which indicates the existence of that antigen or antigens on the surface of target cells that T cells were exposed to.

[0061] In a further embodiment, there is provided a method of identifying linked antigen targets and recognizing B cell receptors or antibodies according to the embodiments.

[0062] Further provided herein is a method of detecting self-antigen specific T or B cells according to the embodiments, wherein the self-antigen specific T or B cells cause severe adverse effect after immune checkpoint blockade therapy in a disease, preventive vaccine or therapeutic vaccine.

[0063] In another embodiment, there is provided a method of detecting T or B cell binding epitopes according to the embodiments and developing the T or B cell binding epitopes into vaccines or TCR or B cell receptor redirected adoptive T or B cell therapy or antibody-based therapies in a disease, preventive vaccine or therapeutic vaccine.

[0064] A further embodiment provides a method of using pathogen and autoimmune disease-associated protein epitopes identified according to the embodiments to monitor the immune health of a subject by associated T or B cell number changes or associated gene signature of T or B cells in a disease, preventive vaccine or therapeutic vaccine.

[0065] A method of detecting regulatory T or B cell binding epitopes according to any one of claims 1-178 and developing vaccines to eliminate or enhance regulator T or B cell function or number for a disease or preventive vaccine or therapeutic vaccine.

[0066] In any of the above embodiments, the disease or preventive vaccine or therapeutic vaccine is in cancer, an infectious disease, autoimmune disease, autoimmune disease, neurodegenerative disease, allergy, asthma, organ transplantation, bone marrow transplantation, trauma, wound, psychological diseases, cardiovascular diseases, diseases of the endocrine system, diseases of any organ or tissue or cells of the human body, or aging.

[0067] Other objects, features and advantages of the present invention will become apparent from the following detailed description. It should be understood, however, that the detailed description and the specific examples, while indicating certain embodiments of the invention, are given by way of illustration only, since various changes and modifications within the spirit and scope of the invention will become apparent to those skilled in the art from this detailed description.

### BRIEF DESCRIPTION OF THE DRAWINGS

[0068] The following drawings form part of the present specification and are included to further demonstrate certain aspects of the present invention. The invention may be better understood by reference to one or more of these drawings in combination with the detailed description of specific embodiments presented herein.

[0069] FIGS. 1A-1I: Workflow for generation of DNA-BC pMHC tetramer library and proof-of-concept of using TetTCR-Seq for high-throughput linking of antigen binding to TCR sequences for single T cells. (a) Workflow for generation of DNA-BC pMHC tetramers. Grey text boxes denote step order and names. (b) DNA-BC pMHC tetramer libraries are used to stain and isolate rare antigen-binding T cell populations from primary human CD8⁺ T cells by magnetic enrichment. Cells are single-cell sorted into lysis buffer and RT-PCR is performed to amplify both the TCRαβ genes and the DNA-BC to determine the pMHC specificities by NGS. Shown is Experiment 1, a proof-of-concept, using a 96 peptide library to link antigenic peptide binding to TCR sequences for hundreds of single T cells. (c) CMV-NLV peptide generated from either IVTT or conventional synthetic (Syn) method were used to form pMHC tetramers in order to stain either a cognate or a non-cognate T cell clone. (d) MID counts per peptide detected on single T cells sorted from the Tetramer-fraction in Experiment 1 (16 out of 768 peptides, aggregated from 8 cells, had >0 MID counts). Dashed line represents MID threshold for identifying positively bound peptides. (e) Peptide rank curve by MID counts for each of top 10 ranked peptides in the order of high-to-low for single sorted cells from the spike-in clone (8 cells) in Experiment 1. Black dashed line represents MID threshold for identifying positively bound peptides as defined in (d). Each solid line represents the MID counts for each of the 96 peptides that can potentially bind on a single cell with only top 10 peptides, by MID counts, are shown. Blue solid lines indicate cells with at least one positively binding peptide; Inset pie charts indicate proportion of cells with the indicated number of positively binding peptides. (f) Fluorescent intensity of the HCV-KLV(WT) binding T cell clone, used as spike-in in Experiment 1, stained individually with the indicated pMHC tetramers, generated using Syn peptides, in a separate validation experiment. (g) Peptide rank curve by MID counts as in (e) for the Tetramer⁺ primary T cell populations (167 cells) in Experiment 1. Black dashed line and blue solid lines are similarly defined as in (e). Grey solid lines indicate cells that did not positively bind any peptides based on the criteria discussed at the beginning of the Supplementary Information. (h) Calculated frequencies of antigen-binding T cell populations in total CD8⁺ T cells for peptide antigens with at least 1 detected T cell, separated by phenotype. (i) V-gene usage of unique TCR sequences that are specific for YFV_LLW (naïve and non-naïve combined, n=11 for TRAV, n=15 for TRBV) or MART1_A2L (naïve and non-naïve combined, n=33 for TRAV, n=43 for TRBV). Fl, fluorescence intensity. MFI, Median Fluorescence Intensity. a.u., arbitrary unit. APL, altered peptide ligand.

[0070] FIGS. 2A-2H: High prevalence of neo-antigen binding T cells that cross-react to WT counterpart peptides and high-throughput isolation of neo-antigen-specific TCRs for multiple specificities in parallel using TetTCR-seq. (a-c) Experiment 3, isolation of single Neo and/or WT binding T cells from a healthy donor using a 40 Neo-WT antigen library. (a) DNA-BC pMHC tetramer staining profile of naïve CD8⁺ T cells from the tetramer pool-enriched fraction. (b) Relative proportion of T cells among the three possible antigen binding combinations (Neo⁺WT⁻, Neo⁻WT⁺, Neo⁺WT⁺) for each Neo-WT antigen pair from Experiment 3. Data was filtered to only include pairs where both peptides were or detected in at least one cell, and have at least 3 detected cells total (149 cells, see Methods). (c) Neo-antigens in (b) were grouped based on mutation positions, middle (4-6) or fringe (1-3, 7-9). Statistical test was performed between the two groups on associated percentage of cross-reactive T cells as red bars shown in (b). Each circle denotes one Neo-WT antigen pair (n=11, One-tailed Mann Whitney U-Test). (d-f) Experiment 5 and 6, isolation of Neo and/or WT binding T cells using a 315 Neo-WT antigen library. (d) DNA-BC pMHC tetramer staining profile of naïve CD8⁺ T cells from the tetramer pool-enriched fraction for Experiment 5. See Supplementary FIG. 15 for gating scheme. (e) Percent cross-reactive T cells for Neo-WT antigen pairs based on the mutation position of the neo-antigen. Same data filter as (b) is used. Each circle denotes one Neo-WT pair (n=517 cells, see Supplementary Information). (f) Neo-antigens in (e) were grouped based on mutation position (left) or PAM1 value (right). Red bars denote median. Statistical test was performed between the two groups as indicated on associated percentage of cross-reactive T cells as shown in (e). (n=62, One-Tailed Mann Whitney U-Test). (g) LDH cytotoxicity assay on in vitro expanded primary T cell lines sorted using DNA-BC pMHC tetramers as in (a) interacting with T2 cells pulsed with the 20 neo-antigen peptide pool or 20 WT counterpart peptide pool. Each pair of black/grey bars represent one T cell line derived from sorting 5 cells from one of the three indicated populations in (a). Each condition was performed in triplicates. Standard deviation is shown for each condition. (h) Fluorescent intensity histogram of Jurkat 76 cell line transduced with TCRs from Experiment 3 and 4 stained with indicated tetramers. One TCR, AB5, was identified to only recognize the neo-antigen, GANAB_S5F, while the other TCR, M11, was identified to be cross-reactive to both the neo-antigen, GANAB_S5F and its WT counterpart, GANAB, from TetTCR-Seq. Fl, fluorescence Intensity. a.u., arbitrary unit.

[0071] FIGS. 3A-3E: pMHC tetramers produced by IVTT has similar staining performance as the conventional method using chemically synthesized peptide. (a-e) pMHC tetramers, containing the indicated peptide (SEQ ID NO: 3969: FIG. 3A; SEQ ID NO: 4030: FIG. 3B; SEQ ID NO: 4075: FIG. 3C; SEQ ID NO: 4115: FIG. 3D; SEQ ID NO: 3983: FIG. 3E), were generated using IVTT or chemically synthesized and used to stain a cognate and non-cognate T cell clone. Anti-CD8a (RPA-T8) was present throughout the staining.

[0072] FIGS. 4A-4F: IVTT can generate 20-100 μM of the desired peptide. (a-f) Peptides generated from either IVTT or the traditional, synthetic peptide method (SEQ ID NO: 3969: FIG. 4A; SEQ ID NO: 4030: FIG. 4B; SEQ ID NO: 4075: FIG. 4C; SEQ ID NO: 4019: FIG. 4D; SEQ ID NO: 4079: FIG. 4E; SEQ ID NO: 4129: FIG. 4F) were diluted at different ratios and were used to form PE labeled pMHC tetramers. Starting concentration of synthetic peptide is 100 μM for all peptides. These pMHC tetramers were used to stain a cognate T cell clone. Anti-CD8a (RPA-T8) was present throughout the staining. MFI: Median Fluorescence Intensity. a.u.: arbitrary unit.

[0073] FIGS. 5A-5D: Covalent attachment of DNA-BC to PE and APC streptavidin does not affect staining intensity of the resulting tetramers. (a-d) PE and APC labeled streptavidin were covalently attached with DNA linker at a molar ratio of 3-7 streptavidin molecules per one molecule of DNA-BC. An oligonucleotide encoding HCV-KLV(WT) was annealed to streptavidin-conjugated DNA linker and extended to form DNA-BC. DNA-BC pMHC tetramers were formed with either the HCV-KLV(WT) or TYR-YMD peptide and with either PE or APC streptavidin scaffold, as indicated. Resulting tetramers were used to stain a cognate and non-cognate T cell clone. Anti-CD8a (RPA-T8) was present throughout the staining. Fl: fluorescence intensity. a.u.: arbitrary unit.

[0074] FIGS. 6A-6E: Quantification of the detection limit of DNA-BC pMHC tetramers. (a) Fluorescence of PE-Quantibrite™ beads that were used for (b) calibration of PE fluorescence intensity to protein abundance. (c) PE labeled, DNA-BC pMHC tetramers containing the HCV-KLV(WT) peptide (with the DNA-BC corresponding to HCV-KLV(WT) sequence) was used to stain a cognate T cell clone at the indicated tetramers dilutions starting at 5 μg/ml for 1×. Anti-CD8a (RPA-T8) was present throughout the staining. (d) Calculation of tetramer abundance on each of the staining dilutions from (c) using the calibration curve from (b). Corrected value indicates subtraction of background value from the unstained cell population. (e) qPCR of DNA-BC on single cells sorted from various populations. Tet Dilution 1×-625× are the 5 tetramer dilutions from (c), amplified with primers specific for DNA-BC encoding the HCV-KLV(WT) sequence. Negative control #1 is a GP100-IMD binding T cell clone that has been stained with 1× dilution of the DNA-BC HCV-KLV(WT) tetramer as in (c), amplified with primers specific for DNA-BC encoding the HCV-KLV(WT) sequence. Negative control #2 is two PE labeled DNA-BC pMHC tetramer were made containing the HCV-KLV(WT) or GP100-IMD peptide. Each tetramer contains a DNA-BC sequence that corresponds to the peptide. The two tetramers were pooled and used to stain the HCV-KLV(WT) binding clone in (c) at 5 μg/ml each (none diluted). qPCR was performed using primers specific for DNA-BC encoding GP100-IMD only (which corresponds to bound GP100-IMD tetramer). Each circle indicates a qPCR reaction with one sorted cell. 0 Cq value represents no detected amplification after 40 cycles. Red bars indicate the mean Cq value for positively amplified cells.

[0075] FIGS. 7A-7D: Gating scheme and sorting strategy for Experiment 1 and 2. (a) Representative gating scheme for Experiment 1 and 2. Shown is gating scheme for Experiment 1. Single-cell lymphocytes were first gated. The HCV-specific T cell clone spike-in, pre-stained with BV605-CD8a, and the primary T cell population, stained with BV785-CD8a, were isolated. CD8⁺ T cells were gated to be 7-AAD⁻CD3⁺. Naïve and non-naïve antigen-binding cells were sorted from the PE⁺, endogenous peptides and APC⁺, foreign peptides. The same antibody panel and gating scheme is used for Experiment 2. (b) Tetramer staining of flow-through fraction was used to set the PE and APC tetramer negative and positive gates. An example from Experiment 1 was shown. (c) Frequency of the four antigen-binding T cell populations for Experiment 1 and 2. (d) Percent of naïve cells from Foreign and Endogenous Tetramer⁺ CD8+ T cells for Experiment 1 and 2. Bulk indicates flow-through CD8+ T cells from the same experiment. (d) Frequency of the four antigen-binding T cell populations for Experiment 1 and 2.

[0076] FIGS. 8A-8E: Processing of DNA-BC sequencing reads for sort 1. Reads within the same cell barcode that have the same MID sequence were clustered together and were considered as one MID. A consensus peptide-encoding sequence was generated for each cluster. (a) MIDs were filtered to only include those having the peptide-encoding sequence be a length of 25-30. All peptides used were 9-10 AA in length, so the DNA length should be 27 and 30. (b) MIDs were then filtered such that the closest Levenshtein distance of the peptide-encoding sequence to the reference DNA-BC list is no greater than 2. (c) Percent of total reads belonging to each group of MIDs sharing the same read count. MIDs with low read counts (left of the vertical dashed line) were discarded as sequencing error. The resulting MIDs can then be assigned to each sorted T cell according to the cell barcode. (d, e) Total MID counts associated with each cell from the PE⁺ (d) and APC⁺ (e) populations from experiment 1 were compared to their corresponding tetramer staining intensity from index sorting analysis. Each circle denotes one cell. Line indicates linear regression and the associated R-squared value.

[0077] FIGS. 9A-9F: Verification of pMHC classification using the spike-in HCV-KLV(WT) binding clone and primary cells with shared TCRs for experiment 1. (a) Top 10 pMHC specificities of the sorted spike-in HCV-KLV(WT) binding clone, ordered by MID count from high-to-low. Bold border separates detected and non-detected binding peptides by the criteria. (b) In a separate experiment, T cell clone from (a) was stained with the indicated conventional pMHC tetramers in separate tubes in the presence of anti-CD8a (RPA-T8). (c,d) Bolded peptides outside the true binding peptide threshold in (a) were tested for pMHC tetramer staining as in (b). (e) MID count for the top 8 ranked peptides for the tetramer+ primary T cells with shared TCRα and/or TCRβ sequence. Dashed line indicates MID count threshold for identifying positive binding peptides. (f) Top 5 peptides by MID count for T cells sharing at least one TCRα or β chain from (e). Bold border separates positive and non-specific binding peptides (SEQ ID NOs: 1621, 1592, 1618, 1614, 1616, 1711, 1705, 1712 and 1719, respectively, left to right by column, top to bottom by row, respectively first appearance only).

[0078] FIGS. 10A-10D: Analysis of Experiment 2. (a) MID counts greater than 0 from peptides in the Tetramer population (n=8 cells). (b) Peptide rank curve by MID counts for all primary T cells. Dashed lines indicate MID threshold for identifying positively bound peptides. Each solid line indicates a cell and only the top 8 peptides were shown ranked by their MID counts. Blue solid lines indicate cells with at least one positively binding peptide; grey solid lines indicate cells that did not positively bind any peptides based on the criteria discussed at the beginning of the supplementary information. Insert pie chart indicate proportion of cells with the indicated number of positively bound peptides. In the insert, paired indicates detection of 2 antigens; one for a wildtype antigen and one for an altered peptide ligand with one amino acid substitution. This was found for GP100 and NY-ESO-1 (Supplementary Table) (c) V-gene usage of TCR sequences that are specific for YFV_LLW (n=27 for TRAV, n=29 for TRBV) or MART1_A2L (n=37 for TRAV, n=39 for TRBV). Only distinct TCR sequences were used (one clonal population counts for only one TRAV and/or one TRBV). (d) Estimated frequencies of antigen-binding T cell populations in total CD8⁺ T cells with at least 1 detected cell, separated by phenotype. It was found that CMV and EBV-specific T cells accounted for the majority of this donor's non-naïve repertoire, which corroborates the CMV and EBV seropositive status of this individual. In agreement with Experiment 1, it was found that, among peptides surveyed, naïve T cells contained greater diversity of antigen specific T cell populations compared to the non-naïve compartment, which is highly skewed towards a select few antigen specific T cell populations. It was also found the same dominance in TCRα V gene usage among the MART1-A2L and YFV-LLW specific TCRs in this donor compared to Experiment 1.

[0079] FIGS. 11A-11D: Gating scheme and sorting strategy for Experiment 3 and 4. (a) Representative gating and sorting scheme for Experiment 3 and 4. Gating scheme for Experiment 3 is shown. (b) Tetramer gating on the flow-through fraction of Experiment 3 (c) Estimated frequency of the sorted Tetramer⁺ populations for Experiment 3 and 4. (d) Percentage of naive cells of the indicated Tetramer⁺ CD8⁺T cell population of total Tetramer⁺ T cells for Experiment 3 and 4. Bulk refers to the flow-through from the same experiment.

[0080] FIGS. 12A-12E: Analysis for Experiment 3. (a) MID counts for each peptide from each cell from the Tetramer population (12 cells, 42 peptides each). (b-d) Peptide rank curve by MID counts for the top 5 peptides for Neo⁺WT⁻ (b), Neo⁻WT⁺ (c), and Neo⁺WT⁺ population (d) for Experiment. Dashed lines indicate MID threshold for identifying positively bound peptides. Each solid line indicates a cell and only the top 5 peptides were shown raked by their MID counts. Blue solid lines indicate cells with at least one positively binding peptide; grey solid lines indicate cells that did not positively bind any peptides based on the criteria discussed at the beginning of the supplementary information. Insert pie charts for all three panels indicate proportion of cells with the indicated number of positively bound peptides. (e) Cell count for all detected peptides for each Neo-WT antigen pair (n=223 cells) (g) Number of Neo⁺WT⁻, Neo⁻WT⁺, and Neo⁺WT⁺ peptides that are targeted by TCRs with successfully recovered TCRαβ sequences.

[0081] FIGS. 13A-13C: Verification of pMHC classification using the spike-in HCV-KLV(WT) binding clone and primary cells with shared TCRs in Experiment 3. (a) Top 5 epitopes by MID count for T cells sharing at least one TCRα or β chain. Bold border indicates the positively-classified binding peptides. TCRα or β chains with the same color in the same cluster have the same nucleotide sequence for the respective chain. (b,c) Peptide rank curve by MID counts for the HCV-KLV(WT) binding spike-in clone (12 cells) (SEQ ID NOs: 1176, 2204, 2199, 2236, 2164, 2261, 2300, 2306, 2505, 2506, 2425, 2445, 2482, 2487 and 2447, respectively, left to right by column, top to bottom by now, first appearance only) (b) and primary cells with shared TCR (13 cells) (c). Dashed lines indicate MID threshold for identifying positively bound peptides. Each solid blue line indicates a cell and only the top 5 peptides were shown raked by their MID counts. For (c) only cells with identical TCRα and TCRβ sequence on an AA level were considered, corresponding to cluster la, 2, 5, and 6 in (a). For WT-antigen, the peptide was named after the protein; for Neo-antigen, the peptide was named as protein name_AA #AA.

[0082] FIGS. 14A-14H: DNA-BC analysis for Experiment 4. (a) MID counts associated with peptides from the sorted Tetramer⁻ CD8⁺ T cells (36 cells). MID threshold for positively binding peptide is designated by the dashed line. (b-d) Peptide rank curve by MID counts for the (b) Neo⁺WT⁻, (c) Neo⁻WT⁺ and (d) Neo⁺WT⁺ primary cells. Dashed line indicates MID threshold for identifying positively bound peptides. Each solid line indicates a cell and only the top 5 peptides were shown ranked by their MID counts. Blue solid lines indicate cells with at least one positively binding peptide; grey solid lines indicate cells that did not positively bind any peptides based on the criteria discussed at the beginning of the supplementary information. Insert pie charts for all three panels indicate proportion of cells with the indicated number of positively bound peptides. (e) Cell count for all detected peptides for each Neo-WT gene pair (n=274 cells). (f) Relative proportion of the three cell populations for each Neo-WT gene pair from (e), similar to FIG. 2B. Each antigen was normalized by the relative frequency and number of cells sorted from the corresponding Tetramer⁺ population (see Methods). Only pairs where both the Neo-antigen and Wildtype were detected in at least one cell, and have at least 3 detected cells total were considered (n=200 cells). (g) Comparison of cross-reactivity for Neo-WT antigen-binding T cell populations from (f) that have mutations near the middle or fringes (n=11 Neo-WT antigen pairs, One-tailed Mann-Whitney U Test). (h) Comparison of the percent cross-reactive T cells that exist within each Neo-WT antigen-binding T cell population between Experiment 3 and 4. Only Neo-WT pairs that meet the criteria in (f) and are shared between the two experiments are considered. Dot represents one Neo-WT pair and lines connect the same pair from the two experiments (n=18, One-tailed Wilcoxon Signed-Rank Test).

[0083] FIGS. 15A-15E: Validation for “undetected” peptides in Experiment 3 and 4. (a) ELISA for all 40 pMHC monomers UV-exchanged with IVTT-generated Neo or WT peptides. UV-exchanged pMHC monomers are plated at a concentration of 1.6 nM estimated based on the un-exchanged MHC monomer concentration, followed by anti-02M staining. Blue dots represent un-exchanged MHC monomer diluted at various concentration from lowest to highest (0.05, 0.25, 1.25, 6.25, 31.25 nM). Red dot represents UV-exchanged pMHC in IVTT solution that did not contain a peptide-encoding DNA template. Black dots indicate the 5 “undetected” peptides in Experiment 3 and 4. Solid line is a sigmoidal model fit to the standards. Arrows indicate “undetected” peptides from Experiment 3 and 4. (b) TetTCR-Seq experiment on an additional donor's PBMC sample using an IVTT-generated pMHC tetramer library for PPI_ALWM and the five “undetected” peptides. Shown is the estimated frequency of each antigen-binding CD8+ T cell population. (c-e) Peptide titration experiments were performed for three of the “undetected” peptides where T cell clones could be generated using Tetramer⁺ T cells from (b). Peptides generated from either IVTT or the traditional, synthetic peptide method, were diluted at different ratios and were used to form PE labeled pMHC tetramers. Starting concentration of synthetic peptide is 100 μM for all peptides. These pMHC tetramers were used to stain a cognate T cell clone. Anti-CD8a (RPA-T8) was present throughout the staining. MFI, Median Fluorescence Intensity. a.u., arbitrary unit. For WT-antigen, the peptide was named after the protein; for neo-antigen, the peptide was named as protein name_AA #AA.

[0084] FIGS. 16A-16D: Gating scheme and sorting strategy for Experiment 5 and 6. (a) Representative gating scheme for Experiment 5 and 6. Shown is the gating scheme for Experiment 5. (b) Tetramer gating on the flow-through fraction from Experiment 5. (c) Estimated frequencies of the three Tetramer⁺ populations for Experiment 5. Frequencies could not be obtained for Experiment 6. (d) Naïve T cell percentages for each of the three Tetramer⁺ populations and bulk flow-through CD8+ T cells for Experiment 5 and 6.

[0085] FIGS. 17A-17K: Analysis of Experiment 5 and 6. (a-h) MID counts associated with peptides from the sorted Tetramer⁻ CD8⁺ T cells for Experiment 5 (a) and 6 (e). Peptide rank curve by MID counts for the indicated Tetramer⁺ cell populations for Experiment 5 (b-d) and 6 (f-h). Dashed line indicates MID threshold for identifying positively bound peptides. Each solid line indicates a cell and only the top 8 peptides were shown ranked by their MID counts. Blue solid lines indicate cells with at least one positively binding peptide; grey solid lines indicate cells that did not positively bind any peptides based on the criteria discussed at the beginning of the Supplementary Information. Insert pie charts for all these panels indicate proportion of cells with the indicated number of positively bound peptides. For insert pie charts, 2+ Paired indicates that all detected peptides from a given cell belong to a particular Neo/WT antigen pair; this has the same meaning as “2” in pie chart inserts of Experiment 3 and 4, but since one WT was included that had two neo-antigens in this library (DHX33-LLA) it was found one cell that was cross reactive to all three peptides, which is counted in this category as well. 2+ unpaired indicates at least 2 detected peptides but at least one peptide did not belong to a particular Neo/WT antigen pair. (i) Total cell counts for Neo-WT antigen pairs with at least one detected cell (n=678 cells). (j) As in FIG. 2f, a greater difference in the percent of cross-reactive antigen-binding populations is observed when revising the peptide middle position to position 3-7. Each circle represents the percent of cross-reactive T cells observed for one Neo-WT antigen pair. Only antigen pairs where both the Neo and WT peptides were detected in at least one cell, with at least 3 cells total are included. Bars denote median. (n=62 Neo-WT antigen pairs, One-tailed Mann-Whitney U Test). (k) Definition of PAM1 high/low threshold. PAM1 values for amino acid pairs i and j are calculated by adding the one directional PAM1 values, PAM1ᵢⱼ+PAM1ⱼᵢ, as defined by Wilbur et al. Shown is a histogram of all the possible PAM1 values between non-identical amino acids (n=190 AA transitions). The top 10% is designated as PAM1 High.

[0086] FIG. 18: ELISA on the 315 pMHC monomer library UV-exchanged with IVTT-generated peptides for Experiment 5 and 6. UV-exchanged pMHC monomer using IVTT-generated peptides are plated on ELISA plates at a concentration of 1.6 nM estimated from unexchanged MHC monomer concentration and then stained with anti-β2m antibody. Blue circles represent pMHC concentration standards. Solid line represents sigmoidal model fit to the standards. Red dot represents UV-exchanged pMHC in IVTT solution that did not contain a peptide-encoding DNA template, thus serves as a negative control. Black dots represent peptides that were not detected in Experiments 5 or 6. Green diamonds represents peptides that were detected in at least one cell in Experiment 5 or 6. Top histogram combines both the detected and undetected peptides in respect to pMHC monomer concentration plotted below. Dashed line represents the minimum threshold for pMHC UV-exchange. The blue dot standard to the right side of the dashed line is 0.4 nM of un-exchanged MHC monomer.

[0087] FIG. 19: Both PE and APC fluorescent DNA-BC pMHC tetramers can be used to sort neo-antigen-specific T cells with no functional reactivity to WT counterpart peptide. A DNA-BC pMHC library was constructed as in Experiment 3 and 4 to sort APC⁺PE⁻ (Neo⁺WT⁻) primary T cells. A fluorescence swapped pMHC library compared to Experiment 3 and 4, where neo-antigen pMHCs were on the PE channel and WT pMHCs were on the APC channel, was used to sort PE⁺APC⁻ (Neo⁺WT⁻) primary T cells. 5 cells were sorted per well for in vitro culture. LDH cytotoxicity assay on in vitro expanded primary T cells sorted interacting with T2 cells pulsed with the 20 neo-antigen peptide pool or 20 WT counterpart peptide pool. Each pair of black/grey bars represent one T cell line. Each condition was performed in triplicates. Standard deviation is shown for each condition.

[0088] FIGS. 20A-20C: Characterization of the Neo⁺WT⁻ and Neo⁺WT⁺ cell lines in FIG. 2G. (a,b) T cell clonal composition as assessed by single cell TCR sequencing and matched pMHC specificity for the T cell lines in the Neo⁺WT⁻ (a) and Neo⁺WT⁺ (b) of FIG. 2g. For (a), TetTCR-Seq was performed for pooled cell lines and the resulting single sorted cells were matched to the correct T cell line from bulk TCR sequencing results of each T cell line (SEQ ID NOs: 4406-4425, respectively, left to right by column, top to bottom by row). For (b), TetTCR-Seq was performed on each T cell line using the 40 Neo-WT DNA-BC pMHC tetramer library. Single cell DNA-BC and TCR sequences were used to tally the T cell clonality and the antigen binding of each T clone within a T cell line. For WT-antigen, the peptide was named after the protein; for neo-antigen, the peptide was named as protein name_AA #AA LDH cytotoxicity assay on the monoclonal T cell Neo⁺WT⁺ lines, discovered from (b), using the pMHC identified by TetTCR-Seq. Each condition performed in triplicates. “Neo pool-1” and “WT Pool-1” refers to the other 19 Neo-antigens and Wildtype peptides, respectively, that were not identified by TetTCR-Seq for the given cell line. HCV-KLV peptide was used as a known-antigen negative control.

[0089] FIGS. 21A-21B: Tetramer staining of additional Jurkat 76 cell lines transduced with TCRs identified from Experiment 3. Jurkat 76 cells were transduced with the indicated TCRs, derived from primary T cell with positively identified antigens from Experiment 3, and then stained with the indicated pMHC tetramers. (a) A pair of TCRs that were identified to be cross reactive for both the Neo-antigen and Wildtype versions of SEC24A or just the Wildtype from TetTCR-Seq. (b) a TCR identified to be cross reactive for the Neo-antigen and Wildtype versions of NSDHL from TetTCR-Seq. Fl, fluorescence Intensity. a.u., arbitrary unit. For WT-antigen, the peptide was named after the protein; for Neo-antigen, the peptide was named as protein name_AA #AA.

[0090] FIGS. 22A-22D: 3′ end sequencing for highly multiplexed single cell RNA-seq (3′end scRNA-seq) is robust and reproducible. (a) Illustration of workflow of 3′end scRNA-seq. (b) Comparison of ERCC detection efficiency between 3′end scRNA-seq and published scRNA-seq data using Fluidigm C1. (c) 3′end scRNA-seq is robust in gene expression quantification compared to original SMART-SEQ2®. (d) 3′end scRNA-seq has very low cross-contamination rate.

[0091] FIGS. 23A-23B: Schematics of TetTCR-SeqHD. (a) Workflow of generating DNA-labeled tetramer for TetTCR-SeqHD. (b) Workflow of application of TetTCR-SeqHD to study gene expression, phenotype, and TCR repertoire of antigen specific T cells

[0092] FIGS. 24A-24D: TetTCR-SeqHD of CD8+ T cell clones. (a) The different antigen specific T cell clones used and the types of TCRβ among these polyclonal populations. (b) The distribution of TCRβ species within each polyclonal population. (c) Sequencing metrics of TetTCR-SeqHD on T cell clones. (d) Density plot of MID counts (log 10) of self and foreign peptides.

[0093] FIGS. 25A-25C: Data quality metrics for T cell clones. (a) Histogram of predicted antigen specificity using pMHC DNA barcodes. Within each predicted antigen specificity, the stacked bar denotes distribution of the true antigen specificity based on TCRβ sequence. (b) The recall and precision rate of antigen specificity identification using pMHC DNA barcodes. (c) Table showing the recall, precision and false discovery rate of antigen specificity identification using pMHC DNA barcodes for each clone.

[0094] FIG. 26: Circos plot showing the distribution of TCRβ species within each predicted antigen specificity using pMHC DNA barcodes.

[0095] FIGS. 27A-27F: TetTCR-SeqHD of enriched CD8+ T cells from frozen healthy blood donors' PBMCs. (a) Density plot of MID counts (log 10) of self and foreign peptides. (b) Histogram of MID counts (log 10) of self and foreign peptides. Dashed line is the negative threshold to call positive tetramer binding events. (c) tSNE analysis of single cell gene expression. Red dots are foreign-antigen specific cells and blue dots are self-antigen specific cells. The antigen specificities were predicted by pMHC DNA barcodes. (d) PCA analysis of antigen specific gene expression characters. (e) Heatmap showing the predicted antigen specificities for the top 10 abundant TCRs with unique TCRα and TCRβ. (f) Table showing the percentage of foreign antigen, self-antigen and negatives in each donor, as well as the ratio between number of foreign and self-antigen specific cells predicted using pMHC DNA barcodes in comparison with flow cytometry. Donor849_negative is the sorted tetramer negative population.

[0096] FIG. 28: AbSeq of antigen specific CD8⁺ T cells. Left: tSNE and phenograph clustering analysis using gene expression and antibody expression. Right: Antibody expression of CD45RA, CD45RO, CD197 and CD95.

### DESCRIPTION OF ILLUSTRATIVE EMBODIMENTS

[0097] It has been a challenge to link peptides with the individual TCR sequences that they bind, compounded when analyzing a large number of peptides in hundreds of single T cells simultaneously. The addition of molecular identifiers to TCR sequencing can improve the accuracy of TCR sequencing. Further, by probing a large number of T cells with MHCs that have been modified to house specific peptides, TCR sequences can be associated with the antigens that they bind. Accordingly, in certain embodiments, the present disclosure provides methods to use molecular identifiers to increase sequencing accuracy and peptide MHC tetramers to stain T cells, in order to link TCR sequences to their antigen.

[0098] In some embodiments, the present disclosure provides compositions and methods to generate DNA barcode labeled pMHC or peptide antigen multimer libraries for hundreds or thousands of peptides, and methods of using the pMHC or peptide antigen multimer libraries to determine the following linked information at single cell level for individual T or B cells: sequences of T or B cell receptors, antigen specificity, T or B cell transcriptomic or gene expression level, and proteogenomics by the expression level of protein markers inside or on the surface of T or B cells at single cell level for individual T or B cells. This linked information is then used to assess T or B cell developmental, activation status, clonal expansion status, phenotype, antigen specificity, and funcation in different physiological or pathological conditions, such as infection, vaccination, allergy, autoimmune diseases, cancer, aging, and neurodegenerative diseases. TCR or BCR sequences and antigen sequences can be used as therapeutics in difference diseases or vaccine. The status of T or B cell developmental, activation status, clonal expansion status, phenotype, antigen specificity, and funcation can be used for immune profiling, disease early diagnosis, therapeutics development, prognosis, treatment progress monitoring, and treatment responder or non-responder separation.

[0099] In some embodiments, the present methods comprise the labelling of oligonucleotides barcoding antigen specificities by first covalently linking a universal DNA linker oligonucleotides or DNA handle to multimer backbone, such as dimerization antibodies or streptavidin. Then, the DNA barcode that either directly encodes the codons for amino acids in the antigen peptide or a string of random oligonucleotides that is designated to represent the identity of a particular peptide is annealed to the universal DNA linker oligonucleotides or DNA handle. This process can eliminate the need to individually covalently link DNA barcode to multimer backbone. This process can be performed in parallel for hundreds or thousands of DNA barcodes. This process can ensures that all of the DNA barcodes use the same batch of multimer backbone with the same DNA handle to multimer ratio. This process can also eliminate the DNA:multimer ratio differences if individual DNA barcodes are to be covalently linked to multimer backbone. This approach made it feasible to screen hundreds or thousands of DNA-labeled antigens at once without introducing bias to the barcode labeling ratio. This way, the true differences on antigen binding can be examined by comparing the DNA barcode aboundance without to worry about if DNA-barcode:multimer ratio introduced by individually labelling DNA barcode to multimer would causing the aboundance difference among different antigens or antigen-specific T cell number difference. This approach can also make it possible to use DNA-barcode number to separate true T cell binding antigens from background noise. This approach can also make it fast and easy to tailor a large set of different peptide antigens for different diseases or different individual patients where antigens are different. This approach can also enable the simultaneous high throughput manner, which can be easily applied in patient samples for screening thousands or tens of thousands of peptides.

[0100] In certain embodiments, the present methods allow for the quick generation of peptides using in vitro transcription and translation. This can allow one to synthesize peptide encoding oligonucleotides, which has a much faster turnaround time and a much lower cost compared to synthesizing peptides. This approach can allow make it fast and easy to tailor a large set of different peptide antigens for different diseases or different individual patients where antigens are different. This approach can also enable the simultaneous high throughput manner, which can be applied in patient samples for screening thousands or tens of thousands of peptides.

[0101] In some aspects, the methods described herein comprise the simultaneous profiling of gene expression or transcriptome, proteogenomics and TCR or BCR sequences for each single cell. This can allows for the assessment of T or B cell developmental, activation status, clonal expansion status, phenotype, antigen specificity, and funcation in different physiological or pathological conditions, such as infection, vaccination, allergy, autoimmune diseases, cancer, aging, and neurodegenerative diseases. TCR or BCR sequences and antigen sequences which can be used as therapeutics in difference diseases or vaccine. The status of T or B cell developmental, activation status, clonal expansion status, phenotype, antigen specificity, and funcation can be used for immune profiling, disease early diagnosis, therapeutics development, prognosis, treatment progress monitoring, and treatment responder or non-responder separation.

[0102] In certain aspects, the methods described herein can be used for scalable analysis for different amounts of cells as well as cells with different frequency in existence, such as antigen-specific CD8+ T cells existed at a frequency of 1 in a million CD8+ T cells or 1 in 100 CD8+ T cells. For rare antigen specific T or B cells or primary antigen specific T or B cells, plate-based single cell sequencing methods can be used while high throughput single cell gene expression analysis platforms can be used for thousands or tens of thousands of antigen specific T or B cells.

[0103] In some embodiments, the present disclosure provides methods for generating peptide MHC (pMHC) multimers for T cell isolation. First, an antigen is prepared by performing in vitro transcription/translation on a barcoded peptide-encoding oligonucleotide. The nascent peptide is then loaded into a MHC monomers, generating a pMHC. Loading may be performed by peptide exchange, such as UV-mediated peptide exchange, temperature-based peptide exchange or other methods. Several pMHC monomers with identical known peptides are then linked to a polymer conjugate which is also linked to an oligonucleotide encoding the peptide now associated with the MHC monomer, as well as a barcode. The polymer conjugate may be a dextran or a polypeptide. The pMHC multimers may further comprise a fluorophore or other detectable moiety which may aid in detection and sorting. The fluorophore may be phycoerythrin (PE), allophycocyani (APE), PE-Cy5, PE-Cy7, APC, APC-Cy7, QDOT® 565, QDOT® 605, QDOT® 655, QDOT® 705, BRILLIANT® VIOLET (BV) 421, BV 605, BV 510, BV 711, BV786, PERCP, PERCP/CY5.5, ALEXAFLUOR® 488, ALEXAFLUOR® 647, FITC, BV570, BV650, DYLIGHT® 488, DYLIGHT® 649, OR PE/DAZZLE® 594. The pMHC multimers generated as above may then be used to interrogate any antigen binding cells, such as T cells. T cells can bind the peptides of the pMHC multimers and thus these pMHC multimers can be used to isolate or stain T cells, such as by FACS. By maintaining the association of the pMHC multimers with the T cells, they may be sequenced together, thereby linking the TCR sequence with its antigen. The library preparation and sequencing can be done in a highly multiplexed fashion by preparing sequencing libraries from pMHC bound T cells which have been FACS sorted into individual wells simultaneously, and subsequently pooled for sequencing. The barcodes included in the pMHC multimers cam increase sequencing accuracy and allow for background reduction. This method accurately pairs T cell receptors with their antigens in a highly multiplexed and cost effective manner. The sequencing of the TCRs is referred to herein as Tetramer associated TCR Sequencing (TetTCR-Seq). Binding may be determined using a library of DNA-barcoded antigen-tetramers that are rapidly and inexpensively generated using an in vitro transcription/translation platform. TetTCR-Seq is effective for rapidly isolating TCR sequences that are only neoantigen-specific with no cross-reactivity to corresponding wildtype-antigens. Thus, in another method, there is provided a method for identifying neoantigen-specific T cell receptors. pMHC multimers comprising neoantigen or wild type peptides are generated using the methods presented herein, and used to stain a plurality of T cells. These pMHC multimers may be labelled so as to distinguish neoantigen presenting pMHC multimers from wild type during sorting. For example, these multimers may be labelled using different fluorophores. These pMHC bound T cells are then sorted and sequenced. T cells which only bind the neoantigen peptides can then be sequenced to identify neoantigen-specific TCRs. This method may be used over the course of immune therapy, so as to monitor the response to therapy. The neoantigen specific T cells may then be used to prepare populations of the specific neoantigen specific T cells. These populations of T cells may then be used to treat a subject, for example, a subject having cancer.

[0104] In another method, there is provided a method for identifying antigen cross-reactivity in naïve T cells. Antigen cross-reactivity can have severe consequences, so it is important for therapeutic purposes that the antigen binding repertoire of T cells is known. To begin, a plurality of pMHC multimers which present either neoantigens or wild type antigens may be used to stain naïve T cells, and sorted. The TCR sequences, and associated neoantigen sequences may then determined by sequencing. This data can then be used to help determine the course of treatment for an individual, whether by T cell therapy, or neoantigen based therapy.

[0105] In some embodiments, there are provided methods for examining antigen-specific T cell frequency using TetTCR-seq to detect a disease or disorder. The TetTCR-seq may be applied to a sample, such as blood or other biological sample, obtained from a subject, particularly a human. The TetTCR-seq may be used to detect infection (e.g., CMV, EBV, HBV, HCV, HPV, and influenza), vaccination, and/or disease history of a subject. For example, the T cell frequency of a viral antigen or cancer antigen may be determined as shown in FIG. 1.

[0106] In another method, there is provided a method for 3′ end sequencing of RNA from a plurality of single cells. 3′ end sequencing is a method for gene expression profiling, but present methods have limited accuracy and biased sequencing depth among all cells analyzed. The method provided herein is based on the SMART-SEQ2© method (Picelli et al., 2013), though incorporates cellular barcodes in the reverse transcription primer to increase throughput and accuracy, and a restriction site in the template switch oligonucleotide. The reverse transcription primers comprising cellular barcodes are added to individual wells prior to cells, thereby discriminating individual cells at the library preparation stage. Cleavage of the restriction site prior to library preparation, followed by custom library preparation using the cleaved site, greatly increases 3′ end enrichment. These libraries can then be pooled and sequenced, and the gene expression can be profiled from a multitude of cells with high accuracy. Single cell 3′ end RNA-seq library can be re-pooled to adjust sequencing depth for each individual cell, thus achieving even read depth distribution among all cells analyzed. This method may be further used to analyze any cell type. Of particular interest is the gene expression of T cells, such as those isolated by the methods described herein.

[0107] In further embodiments, there are provided methods for combining the TetTCR-seq to obtain antigen specificity and TCR sequences with the T cell activation and developmental status by 3′ end single cell RNA-sequencing. The combination may be used to obtain an integrated T cell profile. The integrated T cell profile may be used to determine the presence of a disease or disorder, such as an infection, vaccination response, or cancer immunotherapy response.

[0108] Thus, the current method of TetTCR-seq may be used to obtain the T Cell Receptor (TCR) sequence and the peptide sequence of the peptide Major Histocompatability Complex (pMHC) that the TCR binds. In addition, TetTCR-seq may be used to identify TCR cross-reactivity in a high-throughput manner. The method may be used for identifying non-crossreactive TCR sequences that react with cancer neoantigen epitopes, but not with the wildtype endogeneous epitope. Using a TCR transgenic cell lines or T cell clones generated from primary T cells, this method can also be used to identify a large peptide library to find out all possible cross-reactive peptide that a T cell may have. The read out may be sorting single T cells in either 96 well plates or 384 well plate and using multiplex PCR. A variation of this method can also be used to screen of MHC binding from pool of in vitro transcription/translation generated peptides. In addition, TetTCR-seq can be made high throughput by single cell droplet sequencing to interrogate even large number of T cells.

[0109] Further, the TetTCR-seq may be used to select the best peptide or peptide combinations and/or TCR and TCR combinations, immune monitoring on infection, vaccination, auto-immune diseases, and/or cancer. These methods may further comprise patient evaluation on which therapy to use for infection, to identify the vaccination, for tracking therapy efficacy, infection, or vaccination efficacy, and/or for post-trial analysis of patient stratification, such as responder and non-responders T cell signatures. These may be performed based on TCR clonality and antigen specificity. The 3′end scRNA-seq may be further used to reveal T cell activation and developmental status. Thus, the TetTCR-seq may be combined with in tube 3′end scRNA-seq, BD RHAPSODY™ or 10× genomic's CHROMIUM® systems, which may be high throughput.

[0110] The methods provided herein may be used to detect self-antigen specific T cells, wherein the self-antigen specific T cells cause severe adverse effect after immune checkpoint blockade therapy and other cancer immunotherapy, before a subject is administered a therapy. Also provided herein is a method of detecting T cell binding epitopes and further developing the T cell binding epitopes into vaccines or TCR redirected adoptive T cell therapy for any pathogens. Further, some embodiments provide a method of using common pathogen and auto-immune disease associated epitopes identified according to the present methods to test and monitor the immune health of individuals and predict individual's protective capacity to infection or likelihood of developing auto-immune diseases and monitoring the early on-set of auto-immune diseases. In addition, there is provided a method of detecting regulatory T cell binding epitopes according to the present methods and developing vaccines to eliminate or enhance regulator T cell function or number for immunological diseases.

### I. DEFINITIONS

[0111] “Treatment” and “treating” refer to administration or application of a therapeutic agent to a subject or performance of a procedure or modality on a subject for the purpose of obtaining a therapeutic benefit of a disease or health-related condition. For example, a treatment may include administration of a T cell therapy comprising T cells bearing high affinity TCR(s) or a mixture of neo-antigen peptides as a vaccine or immune checkpoint blockade.

[0112] “Subject” and “patient” refer to either a human or non-human, such as primates, mammals, and vertebrates. In particular embodiments, the subject is a human.

[0113] The term “antibody” herein is used in the broadest sense and specifically covers monoclonal antibodies (including full length monoclonal antibodies), polyclonal antibodies, multispecific antibodies (e.g., bispecific antibodies), and antibody fragments so long as they exhibit the desired biological activity.

[0114] The term “monoclonal antibody” as used herein refers to an antibody obtained from a population of substantially homogeneous antibodies, e.g., the individual antibodies comprising the population are identical except for possible mutations, e.g., naturally occurring mutations, that may be present in minor amounts. Thus, the modifier “monoclonal” indicates the character of the antibody as not being a mixture of discrete antibodies. In certain embodiments, such a monoclonal antibody typically includes an antibody comprising a polypeptide sequence that binds a target, wherein the target-binding polypeptide sequence was obtained by a process that includes the selection of a single target binding polypeptide sequence from a plurality of polypeptide sequences. For example, the selection process can be the selection of a unique clone from a plurality of clones, such as a pool of hybridoma clones, phage clones, or recombinant DNA clones. It should be understood that a selected target binding sequence can be further altered, for example, to improve affinity for the target, to humanize the target binding sequence, to improve its production in cell culture, to reduce its immunogenicity in vivo, to create a multispecific antibody, etc. and that an antibody comprising the altered target binding sequence is also a monoclonal antibody of this invention. In contrast to polyclonal antibody preparations, which typically include different antibodies directed against different determinants (epitopes), each monoclonal antibody of a monoclonal antibody preparation is directed against a single determinant on an antigen. In addition to their specificity, monoclonal antibody preparations are advantageous in that they are typically uncontaminated by other immunoglobulins.

[0115] The phrases “pharmaceutical or pharmacologically acceptable” refers to molecular entities and compositions that do not produce an adverse, allergic, or other untoward reaction when administered to an animal, such as a human, as appropriate. The preparation of a pharmaceutical composition comprising an antibody or additional active ingredient will be known to those of skill in the art in light of the present disclosure. Moreover, for animal (e.g., human) administration, it will be understood that preparations should meet sterility, pyrogenicity, general safety, and purity standards as required by FDA Office of Biological Standards.

[0116] As used herein, “pharmaceutically acceptable carrier” includes any and all aqueous solvents (e.g., water, alcoholic/aqueous solutions, saline solutions, parenteral vehicles, such as sodium chloride, Ringer's dextrose, etc.), non-aqueous solvents (e.g., propylene glycol, polyethylene glycol, vegetable oil, and injectable organic esters, such as ethyloleate), dispersion media, coatings, surfactants, antioxidants, preservatives (e.g., antibacterial or antifungal agents, anti-oxidants, chelating agents, and inert gases), isotonic agents, absorption delaying agents, salts, drugs, drug stabilizers, gels, binders, excipients, disintegration agents, lubricants, sweetening agents, flavoring agents, dyes, fluid and nutrient replenishers, such like materials and combinations thereof, as would be known to one of ordinary skill in the art. The pH and exact concentration of the various components in a pharmaceutical composition are adjusted according to well-known parameters.

[0117] “T cell” as used herein denotes a lymphocyte that is maintained in the thymus and has either α:β or γ:δ heterodimeric receptor. There are Va, vβ, Vy and V8, Ja, Iβ, Jy and J5, and \ddot{ν}β and ′Oδ loci. Naive T cells have not encountered specific antigens and T cells are naive when leaving the thymus. Naive T cells are identified as CD45RO″, CD45RA⁺, and CD62L⁺. Memory T cells mediate immunological memory to respond rapidly on re-exposure to the antigen that originally induced their expansion and can be “CD8⁺” (T cytotoxic cells) or “CD4⁺” (T helper cells). Memory CD4 T cells are identified as CD4⁺, CD45RO⁺ cells and memory CD8 cells are identified as CD8⁺ CD45RO⁺. In some aspects, “precursor T cells” refers to cells found in individuals without an immune response to antigen targets. The antigen targets may be HIV-specific T cells in healthy HIV negative blood donors or pre-proinsulin-specific T cells in healthy blood donors who are not diabetic.

[0118] “T cell receptor” (TCR) refers to a molecule found on the surface of T cells (or T lymphocytes) that, in association with CD3, is generally responsible for recognizing antigens bound to major histocompatibility complex (MHC) molecules. The TCR has a disulfide-linked heterodimer of the highly variable α and β chains (also known as TCRα and TCRβ, respectively) in most T cells. In a small subset of T cells, the TCR is made up of a heterodimer of variable γ and δ chains (also known as TCRγ and TCRδ, respectively). Each chain of the TCR is a member of the immunoglobulin superfamily and possesses one N-terminal immunoglobulin variable domain, one immunoglobulin constant domain, a transmembrane region, and a short cytoplasmic tail at the C-terminal end (see Janeway et al., 1997). TCR as used in the present disclosure may be from various animal species, including human, mouse, rat, or other mammals. A TCR may be cell-bound or in soluble form.

[0119] TCRs of this disclosure can be “immunospecific” or capable of binding to a desired degree, including “specifically or selectively binding” a target while not significantly binding other components present in a test sample.

[0120] “Major histocompatibility complex molecules” (MHC molecules) refer to glycoproteins that deliver peptide antigens to a cell surface. MHC class I molecules are heterodimers consisting of a membrane spanning a chain and a non-covalently associated 02 microglobulin. MHC class II molecules are composed of two transmembrane glycoproteins, a and R, both of which span the membrane. Each chain has two domains. MHC class I molecules deliver peptides originating in the cytosol to the cell surface, where the peptide:MHC complex is recognized by CD8+ T cells. MHC class II molecules deliver peptides originating in the vesicular system to the cell surface, where they are recognized by CD4+ T cells. An MHC molecule may be from various animal species, including human, mouse, rat, or other mammals.

[0121] “Peptide antigen” refers to an amino acid sequence, ranging from about 7 amino acids to about 25 amino acids in length that is specifically recognized by a TCR, or binding domains thereof, as an antigen, and which may be derived from or based on a fragment of a longer target biological molecule (e.g., polypeptide, protein) or derivative thereof. An antigen may be expressed on a cell surface, within a cell, or as an integral membrane protein. An antigen may be a host-derived (e.g., tumor antigen, autoimmune antigen) or have an exogenous origin (e.g., bacterial, viral).

[0122] “MHC-peptide tetramer staining” refers to an assay used to detect antigen-specific T cells, which features a tetramer of MHC molecules, each comprising an identical peptide having an amino acid sequence that is cognate (e.g., identical or related to) at least one antigen, wherein the complex is capable of binding T cells specific for the cognate antigen. Each of the MHC molecules may be tagged with a biotin molecule. Biotinylated MHC/peptides are tetramerized by the addition of streptavidin, which is typically fluorescently labeled. The tetramer may be detected by flow cytometry via the fluorescent label. The fluorescent label, or fluorophore, may be phycoerythrin (PE), allophycocyani (APE), PE-Cy5, PE-Cy7, APC, APC-Cy7, QDOT® 565, QDOT® 605, QDOT® 655, QDOT® 705, Brilliant® Violet (BV) 421, BV 605, BV 510, BV 711, BV786, PerCP, PerCP/Cy5.5, AlexaFluor® 488, AlexaFluor® 647, FITC, BV570, BV650, DYLIGHT® 488, DYLIGHT® 649, PE/DAZZLE® 594.

[0123] “Nucleotide,” as used herein, is a term of art that refers to a base-sugar-phosphate combination. Nucleotides are the monomeric units of nucleic acid polymers, i.e., of DNA and RNA. The term includes ribonucleotide triphosphates, such as rATP, rCTP, rGTP, or rUTP, and deoxyribonucleotide triphosphates, such as dATP, dCTP, dUTP, dGTP, or dTTP.

[0124] A “nucleoside” is a base-sugar combination, i.e., a nucleotide lacking a phosphate. It is recognized in the art that there is a certain inter-changeability in usage of the terms nucleoside and nucleotide. For example, the nucleotide deoxyuridine triphosphate, dUTP, is a deoxyribonucleoside triphosphate. After incorporation into DNA, it serves as a DNA monomer, formally being deoxyuridylate, i.e., dUMP or deoxyuridine monophosphate. One may say that one incorporates dUTP into DNA even though there is no dUTP moiety in the resultant DNA. Similarly, one may say that one incorporates deoxyuridine into DNA even though that is only a part of the substrate molecule.

[0125] The term “nucleic acid” or “polynucleotide” will generally refer to at least one molecule or strand of DNA, RNA, DNA-RNA chimera or a derivative or analog thereof, comprising at least one nucleobase, such as, for example, a naturally occurring purine or pyrimidine base found in DNA (e.g. adenine “A,” guanine “G,” thymine “T” and cytosine “C”) or RNA (e.g. A, G, uracil “U” and C). The term “nucleic acid” encompasses the terms “oligonucleotide” and “polynucleotide.” The term “oligonucleotide” refers to at least one molecule of between about 3 and about 100 nucleobases in length. The term “polynucleotide” refers to at least one molecule of greater than about 100 nucleobases in length. These definitions generally refer to at least one single-stranded molecule, but in specific embodiments will also encompass at least one additional strand that is partially, substantially, or fully complementary to at least one single-stranded molecule. Thus, a nucleic acid may encompass at least one double-stranded molecule or at least one triple-stranded molecule that comprises one or more complementary strand(s) or “complement(s)” of a particular sequence comprising a strand of the molecule. As used herein, a single stranded nucleic acid may be denoted by the prefix “ss”, a double-stranded nucleic acid by the prefix “ds”, and a triple stranded nucleic acid by the prefix “ts.”

[0126] A “nucleic acid molecule” or “nucleic acid target molecule” refers to any single-stranded or double-stranded nucleic acid molecule including standard canonical bases, hypermodified bases, non-natural bases, or any combination of the bases thereof. For example, and without limitation, the nucleic acid molecule contains the four canonical DNA bases—adenine, cytosine, guanine, and thymine, and/or the four canonical RNA bases—adenine, cytosine, guanine, and uracil. Uracil can be substituted for thymine when the nucleoside contains a 2′-deoxyribose group. The nucleic acid molecule can be transformed from RNA into DNA and from DNA into RNA. For example, and without limitation, mRNA can be created into complementary DNA (cDNA) using reverse transcriptase and DNA can be created into RNA using RNA polymerase. A nucleic acid molecule can be of biological or synthetic origin. Examples of nucleic acid molecules include genomic DNA, cDNA, RNA, a DNA/RNA hybrid, amplified DNA, a pre-existing nucleic acid library, etc. A nucleic acid may be obtained from a human sample, such as blood, cells in leukapheresis chamber, serum, plasma, cerebrospinal fluid, cheek scrapings, biopsy, semen, urine, feces, saliva, sweat, etc. A nucleic acid molecule may be subjected to various treatments, such as repair treatments and fragmenting treatments. Fragmenting treatments include mechanical, sonic, and hydrodynamic shearing. Repair treatments include nick repair via extension and/or ligation, polishing to create blunt ends, removal of damaged bases, such as deaminated, derivatized, abasic, or crosslinked nucleotides, etc. A nucleic acid molecule of interest may also be subjected to chemical modification (e.g., bisulfite conversion, methylation/demethylation), extension, amplification (e.g., PCR, isothermal, etc.), etc.

[0127] “Analogous” forms of purines and pyrimidines are well known in the art, and include, but are not limited to aziridinylcytosine, 4-acetylcytosine, 5-fluorouracil, 5-bromouracil, 5-carboxymethylaminomethyl-2-thiouracil, 5-carboxymethylaminomethyluracil, inosine, N6-isopentenyladenine, 1-methyladenine, 1-methylpseudouracil, 1-methylguanine, 1-methylinosine, 2,2-dimethylguanine, 2-methyladenine, 2-methylguanine, 3-methylcytosine, 5-methylcytosine, N.sup.6-methyladenine, 7-methylguanine, 5-methylaminomethyluracil, 5-methoxyaminomethyl-2-thiouracil, beta-D-mannosylqueosine, 5-methoxyuracil, 2-methylthio-N6-isopentenyladenine, uracil-5-oxyacetic acid methylester, pseudouracil, queosine, 2-thiocytosine, 5-methyl-2-thiouracil, 2-thiouracil, 4-thiouracil, 5-methyluracil, uracil-5-oxyacetic acid, and 2,6-diaminopurine. The nucleic acid molecule can also contain one or more hypermodified bases, for example and without limitation, 5-hydroxymethyluracil, 5-hydroxyuracil, a-putrescinylthymine, 5-hydroxymethylcytosine, 5-hydroxycytosine, 5-methylcytosine, ˜-methyl cytosine, 2-aminoadenine, acarbamoylmethyladenine, N′-methyladenine, inosine, xanthine, hypoxanthine, 2,6-diaminpurine, and N7-methylguanine. The nucleic acid molecule can also contain one or more non-natural bases, for example and without limitation, 7-deaza-7-hydroxymethyladenine, 7-deaza-7-hydroxymethylguanine, isocytosine (isoC), 5-methylisocytosine, and isoguanine (isoG). The nucleic acid molecule containing only canonical, hypermodified, non-natural bases, or any combinations the bases thereof, can also contain, for example and without limitation where each linkage between nucleotide residues can consist of a standard phosphodiester linkage, and in addition, may contain one or more modified linkages, for example and without limitation, substitution of the non-bridging oxygen atom with a nitrogen atom (i.e., a phosphoramidate linkage, a sulfur atom (i.e., a phosphorothioate linkage), or an alkyl or aryl group (i.e., alkyl or aryl phosphonates), substitution of the bridging oxygen atom with a sulfur atom (i.e., phosphorothiolate), substitution of the phosphodiester bond with a peptide bond (i.e., peptide nucleic acid or PNA), or formation of one or more additional covalent bonds (i.e., locked nucleic acid or LNA), which has an additional bond between the 2′-oxygen and the 4′-carbon of the ribose sugar.

[0128] Nucleic acid(s) that are “complementary” or “complement(s)” are those that are capable of base-pairing according to the standard Watson-Crick, Hoogsteen or reverse Hoogsteen binding complementarity rules. As used herein, the term “complementary” or “complement(s)” may refer to nucleic acid(s) that are substantially complementary, as may be assessed by the same nucleotide comparison set forth above. The term “substantially complementary” may refer to a nucleic acid comprising at least one sequence of consecutive nucleobases, or semiconsecutive nucleobases if one or more nucleobase moieties are not present in the molecule, are capable of hybridizing to at least one nucleic acid strand or duplex even if less than all nucleobases do not base pair with a counterpart nucleobase. In certain embodiments, a “substantially complementary” nucleic acid contains at least one sequence in which about 70%, about 71%, about 72%, about 73%, about 74%, about 75%, about 76%, about 77%, about 77%, about 78%, about 79%, about 80%, about 81%, about 82%, about 83%, about 84%, about 85%, about 86%, about 87%, about 88%, about 89%, about 90%, about 91%, about 92%, about 93%, about 94%, about 95%, about 96%, about 97%, about 98%, about 99%, to about 100%, and any range therein, of the nucleobase sequence is capable of base-pairing with at least one single or double-stranded nucleic acid molecule during hybridization. In certain embodiments, the term “substantially complementary” refers to at least one nucleic acid that may hybridize to at least one nucleic acid strand or duplex in stringent conditions. In certain embodiments, a “partially complementary” nucleic acid comprises at least one sequence that may hybridize in low stringency conditions to at least one single or double-stranded nucleic acid, or contains at least one sequence in which less than about 70% of the nucleobase sequence is capable of base-pairing with at least one single or double-stranded nucleic acid molecule during hybridization.

[0129] “Incorporating,” as used herein, means becoming part of a nucleic acid polymer.

[0130] “Oligonucleotide,” as used herein, refers collectively and interchangeably to two terms of art, “oligonucleotide” and “polynucleotide.” Note that although oligonucleotide and polynucleotide are distinct terms of art, there is no exact dividing line between them and they are used interchangeably herein. The term “adaptor” may also be used interchangeably with the terms “oligonucleotide” and “polynucleotide.”

[0131] The term “primer” or “oligonucleotide primer” as used herein, refers to an oligonucleotide that hybridizes to the template strand of a nucleic acid and initiates synthesis of a nucleic acid strand complementary to the template strand when placed under conditions in which synthesis of a primer extension product is induced, i.e., in the presence of nucleotides and a polymerization-inducing agent such as a DNA or RNA polymerase and at suitable temperature, pH, metal concentration, and salt concentration. The primer is generally single-stranded for maximum efficiency in amplification, but may alternatively be double-stranded. If double-stranded, the primer can first be treated to separate its strands before being used to prepare extension products. This denaturation step is typically affected by heat, but may alternatively be carried out using alkali, followed by neutralization. Thus, a “primer” is complementary to a template, and complexes by hydrogen bonding or hybridization with the template to give a primer/template complex for initiation of synthesis by a polymerase, which is extended by the addition of covalently bonded bases linked at its 3′ end complementary to the template in the process of DNA or RNA synthesis.

[0132] “Amplification,” as used herein, refers to any in vitro process for increasing the number of copies of a nucleotide sequence or sequences. Nucleic acid amplification results in the incorporation of nucleotides into DNA or RNA. As used herein, one amplification reaction may consist of many rounds of DNA replication. For example, one PCR reaction may consist of 30-100 “cycles” of denaturation and replication.

[0133] “Polymerase chain reaction,” or “PCR,” means a reaction for the in vitro amplification of specific DNA sequences by the simultaneous primer extension of complementary strands of DNA. In other words, PCR is a reaction for making multiple copies or replicates of a target nucleic acid flanked by primer binding sites, such reaction comprising one or more repetitions of the following steps: (i) denaturing the target nucleic acid, (ii) annealing primers to the primer binding sites, and (iii) extending the primers by a nucleic acid polymerase in the presence of nucleoside triphosphates. Usually, the reaction is cycled through different temperatures optimized for each step in a thermal cycler instrument. Particular temperatures, durations at each step, and rates of change between steps depend on many factors well-known to those of ordinary skill in the art, e.g., exemplified by the references: McPherson et al, editors, PCR: A Practical Approach and PCR2: A Practical Approach (IRL Press, Oxford, 1991 and 1995, respectively).

[0134] “Nested PCR” refers to a two-stage PCR wherein the amplicon of a first PCR becomes the sample for a second PCR using a new set of primers, at least one of which binds to an interior location of the first amplicon. As used herein, “initial primers” or “first set of primers” in reference to a nested amplification reaction mean the primers used to generate a first amplicon, and “secondary primers” or “second set of primers” mean the one or more primers used to generate a second, or nested, amplicon. “Multiplexed PCR” means a PCR wherein multiple target sequences (or a single target sequence and one or more reference sequences) are simultaneously carried out in the same reaction mixture, e.g. Bernard et al, Anal. Biochem., 273: 221-228 (1999) (two-color real-time PCR). Usually, distinct sets of primers are employed for each sequence being amplified.

[0135] The term “barcode” refers to a nucleic acid sequence that is used to identify a single cell or a subpopulation of cells. Barcode sequences can be linked to a target nucleic acid of interest during amplification and used to trace back the amplicon to the cell from which the target nucleic acid originated. A barcode sequence can be added to a target nucleic acid of interest during amplification by carrying out PCR with a primer that contains a region comprising the barcode sequence and a region that is complementary to the target nucleic acid such that the barcode sequence is incorporated into the final amplified target nucleic acid product (i.e., amplicon). Barcodes can be included in either the forward primer or the reverse primer or both primers used in PCR to amplify a target nucleic acid.

[0136] The term “molecular identifier” (or “MID”) as used herein refers to a unique nucleotide sequence that is used to distinguish between a single cell or genome or a subpopulation of cells or genomes, and to distinguish duplicate sequences arising from amplification from those which are biological duplicates. MIDs may also be used to count the occurrences of specific, tagged sequences for absolute molecular counting. A MID can be linked to a target nucleic acid of interest by ligation prior to amplification, or during amplification (e.g., reverse transcription or PCR), and used to trace back the amplicon to the genome or cell from which the target nucleic acid originated. A MID can be added to a target nucleic acid by including the sequence in the adaptor to be ligated to the target. A MID can also be added to a target nucleic acid of interest during amplification by carrying out reverse transcription with a primer that contains a region comprising the barcode sequence and a region that is complementary to the target nucleic acid such that the barcode sequence is incorporated into the final amplified target nucleic acid product (i.e., amplicon). The MID may be any number of nucleotides of sufficient length to distinguish the MID from other MID. For example, a MID may be anywhere from 4 to 20 nucleotides long, such as 5 to 11, or 12 to 20. In particular aspects, the MID has a length of 6 random nucleotides. The term “molecular identifier,” “MID,” “molecular identification sequence,” “MIS,” “unique molecular identifier,” “UMI,” “molecular barcode,” “molecular identifier sequence”, “molecular tag sequence” and “barcode” are used interchangeably herein.

[0137] “Sample” means a material obtained or isolated from a fresh or preserved biological sample or synthetically-created source that contains nucleic acids of interest. In certain embodiments, a sample is the biological material that contains the variable immune region(s) for which data or information are sought. Samples can include at least one cell, fetal cell, cell culture, tissue specimen, blood, cells in leukapheresis chamber, serum, plasma, saliva, urine, tear, vaginal secretion, sweat, lymph fluid, cerebrospinal fluid, mucosa secretion, peritoneal fluid, ascites fluid, fecal matter, body exudates, umbilical cord blood, chorionic villi, amniotic fluid, embryonic tissue, multicellular embryo, lysate, extract, solution, or reaction mixture suspected of containing immune nucleic acids of interest. Samples can also include non-human sources, such as non-human primates, rodents and other mammals, other animals, plants, fungi, bacteria, and viruses.

### II. ANTIGEN-SPECIFIC T CELL ISOLATION

[0138] Certain embodiments of the present disclosure concern obtaining a population of antigen-specific T cells which are used to determine the TCR sequence. Particularly, the present disclosure relates to a substantially pure antigen-specific T cell population having a functional status which is substantially unaltered by a purification procedure comprising staining the desired T cell population, isolating the stained T cell population from a sample comprising non-stained T cell population and removing said stain, i.e. the functional status of the T cell population before purification is substantially the same as after the purification. In particular aspects, a T cell population is provided which is substantially free from any binding reagents used for the isolation of the population, e.g. antibodies or TCR binding ligands such as multimeric TCR binding ligands. The T cells may be from an in vitro culture, or a physiologic sample. For the most part, the physiologic samples employed will be blood or lymph, but samples may also involve other sources of T cells, particularly where T cells may be invasive. Thus, other sites of interest are tissues, or associated fluids, as in the brain, lymph node, neoplasms, spleen, liver, kidney, pancreas, tonsil, thymus, joints, and synovia. Prior treatments may involve removal of cells by various techniques, including centrifugation, using Ficoll-Hypaque, panning, affinity separation, using antibodies specific for one or more markers present as surface membrane proteins on the surface of cells, or any other technique that provides enrichment of the set or subset of cells of interest.

### A. Starting Population of T Cells

[0139] A starting population of T cells can be obtained from a patient sample or from a healthy blood donor. In some aspects, the sample is a blood sample such as peripheral blood sample or cells in leukapheresis chamber. The blood sample can be about 1 mL to about 500 mL, such as about 2 mL to 80 mL, such as about 50 mL. The sample can include at least 500 antigen-specific T cells, at least 250 antigen-specific T cells, at least 100 antigen-specific T cells or at least 10 antigen-specific T cells.

[0140] In some embodiments, the T cells are derived from the blood, bone marrow, lymph, or lymphoid organs. In some aspects, the cells are human cells. The cells typically are primary cells, such as those isolated directly from a subject and/or isolated from a subject and frozen. In some embodiments, the cells include one or more subsets of T cells or other cell types, such as whole T cell populations, CD4⁺ cells, CD8⁺ cells, and subpopulations thereof, such as those defined by function, activation state, maturity, potential for differentiation, expansion, recirculation, localization, and/or persistence capacities, antigen-specificity, type of antigen receptor, presence in a particular organ or compartment, marker or cytokine secretion profile, and/or degree of differentiation. With reference to the subject to be treated, the cells may be allogeneic and/or autologous. In some embodiments, the methods include isolating cells from the subject, preparing, processing, culturing, and/or engineering them, as described herein, and re-introducing them into the same patient, before or after cryopreservation.

[0141] Among the sub-types and subpopulations of T cells (e.g., CD4⁺ and/or CD8⁺ T cells) are naive T (TN) cells, effector T cells (TEFF), memory T cells and sub-types thereof, such as stem cell memory T (TSCM), central memory T (TCM), effector memory T (TEM), or terminally differentiated effector memory T cells, tumor-infiltrating lymphocytes (TIL), immature T cells, mature T cells, helper T cells, cytotoxic T cells, mucosa-associated invariant T (MAIT) cells, naturally occurring and adaptive regulatory T (Treg) cells, helper T cells, such as TH1 cells, TH2 cells, TH3 cells, TH17 cells, TH9 cells, TH22 cells, follicular helper T cells, alpha/beta T cells, and delta/gamma T cells.

[0142] In some embodiments, one or more of the T cell populations is enriched for or depleted of cells that are positive for a specific marker, such as surface markers, or that are negative for a specific marker. In some cases, such markers are those that are absent or expressed at relatively low levels on certain populations of T cells (e.g., non-memory cells) but are present or expressed at relatively higher levels on certain other populations of T cells (e.g., memory cells). In one embodiment, the cells (e.g., CD8⁺ cells or CD3⁺ cells) are enriched for (i.e., positively selected for) cells that are positive or expressing high surface levels of CD45RO, CCR7, CD28, CD27, CD44, CD127, and/or CD62L and/or depleted of (e.g., negatively selected for) cells that are positive for or express high surface levels of CD45RA. In some embodiments, cells are enriched for or depleted of cells positive or expressing high surface levels of CD122, CD95, CD25, CD27, and/or IL7-Ra (CD127). In some examples, CD8+ T cells are enriched for cells positive for CD45RO (or negative for CD45RA) and for CD62L.

[0143] In some embodiments, T cells are separated from a PBMC sample or cells in leukapheresis chamber by negative selection of markers expressed on non-T cells, such as B cells, monocytes, or other white blood cells, such as CD14. In some aspects, a CD4⁺ or CD8⁺ selection step is used to separate CD4⁺ helper and CD8⁺ cytotoxic T cells. Such CD4⁺ and CD8⁺ populations can be further sorted into sub-populations by positive or negative selection for markers expressed or expressed to a relatively higher degree on one or more naive, memory, and/or effector T cell subpopulations.

[0144] In some embodiments, the T cells are autologous T cells. In this method, tumor samples are obtained from patients and a single cell suspension is obtained. The single cell suspension can be obtained in any suitable manner, e.g., mechanically (disaggregating the tumor using, e.g., a gentleMACS™ Dissociator, MILTENYI BIOTECH®, Auburn, Calif.) or enzymatically (e.g., collagenase or DNase). Single-cell suspensions of tumor enzymatic digests are cultured in interleukin-2 (IL-2). The cells are cultured until confluence (e.g., about 2×10⁶ lymphocytes), e.g., from about 10 to about 30 days, such as about 15 to about 28 days.

[0145] The cultured T cells can be pooled and rapidly expanded. Rapid expansion provides an increase in the number of antigen-specific T-cells of at least about 50-fold (e.g., 50-, 60-, 70-, 80-, 90-, 100-, 150-fold or greater) over a period of about 10 to about 28 days. In particular, rapid expansion provides an increase of at least about 200-fold (e.g., 200-, 300-, 400-, 500-, 600-, 700-, 800-, 900-, 1000-fold or greater) over a period of about 10 to about 28 days. In some aspects, the TCR affinity is measured and/or sequence is obtained from T cells, such as tumor infiltrating lymphocytes with or without in vitro expansion.

### B. Antigens

[0146] Any suitable antigen may find use in the present method. Exemplary antigens include, but are not limited to, antigenic molecules from infectious agents, auto-/self-antigens, tumor-/cancer-associated antigens, and tumor neoantigens (Linnemann et al., 2015).

[0147] Tumor-associated antigens may be derived from prostate, breast, colorectal, lung, pancreatic, renal, mesothelioma, ovarian, or melanoma cancers. Exemplary tumor-associated antigens or tumor cell-derived antigens include MAGE 1, 3, and MAGE 4 (or other MAGE antigens such as those disclosed in International Patent Publication No. WO99/40188); PRAME; BAGE; RAGE, Lage (also known as NY ESO 1); SAGE; and HAGE or GAGE. These non-limiting examples of tumor antigens are expressed in a wide range of tumor types such as melanoma, lung carcinoma, sarcoma, and bladder carcinoma. Prostate cancer tumor-associated antigens include, for example, prostate specific membrane antigen (PSMA), prostate-specific antigen (PSA), prostatic acid phosphates, NKX3.1, and six-transmembrane epithelial antigen of the prostate (STEAP). The tumor-associated antigen may be a testis antigen or germline cancer antigen, such as MAGE-A1, MAGE-A3, MAGE-A4, NY-ESO-1, PRAME, CT83 and SSX2.

[0148] Other tumor associated antigens include Plu-1, HASH-1, HasH-2, Cripto and Criptin. Additionally, a tumor antigen may be a self peptide hormone, such as whole length gonadotrophin hormone releasing hormone (GnRH, International Patent Publication No. WO 95/20600), a short 10 amino acid long peptide, useful in the treatment of many cancers.

[0149] Tumor antigens include tumor antigens derived from cancers that are characterized by tumor-associated antigen expression, such as HER-2/neu expression. Tumor-associated antigens of interest include lineage-specific tumor antigens such as the melanocyte-melanoma lineage antigens MART-1/Melan-A, gplOO, gp75, mda-7, tyrosinase and tyrosinase-related protein. Illustrative tumor-associated antigens include, but are not limited to, tumor antigens derived from or comprising any one or more of, p53, Ras, c-Myc, cytoplasmic serine/threonine kinases (e.g., A-Raf, B-Raf, and C-Raf, cyclin-dependent kinases), MAGE-A1, MAGE-A2, MAGE-A3, MAGE-A4, MAGE-A6, MAGE-A 10, MAGE-A12, MART-1, BAGE, DAM-6, -10, GAGE-1, -2, -8, GAGE-3, -4, -5, -6, -7B, NA88-A, MART-1, MC1R, GplOO, PSA, PSM, Tyrosinase, TRP-1, TRP-2, ART-4, CAMEL, CEA, Cyp-B, hTERT, hTRT, iCE, MUCI, MUC2, Phosphoinositide 3-kinases (POKs), TRK receptors, PRAME, P15, RU1, RU2, SART-1, SART-3, Wilms' tumor antigen (WTi), AFP, -catenin/m, Caspase-8/m, CEA, CDK-4/m, ELF2M, GnT-V, G250, HSP70-2M, HST-2, KIAA0205, MUM-1, MUM-2, MUM-3, Myosin/m, RAGE, SART-2, TRP-2/INT2, 707-AP, Annexin II, CDC27/m, TPI/mbcr-abl, BCR-ABL, interferon regulatory factor 4 (IRF4), ETV6/AML, LDLR/FUT, Pml/RAR, Tumor-associated calcium signal transducer 1 (TACSTD1) TACSTD2, receptor tyrosine kinases (e.g., Epidermal Growth Factor receptor (EGFR) (in particular, EGFRvIII), platelet derived growth factor receptor (PDGFR), vascular endothelial growth factor receptor (VEGFR)), cytoplasmic tyrosine kinases (e.g., src-family, syk-ZAP70 family), integrin-linked kinase (ILK), signal transducers and activators of transcription STAT3, STATS, and STATE, hypoxia inducible factors (e.g., HIF-1 and HIF-2), Nuclear Factor-Kappa B (NF-B), Notch receptors (e.g., Notchl-4), c-Met, mammalian targets of rapamycin (mTOR), WNT, extracellular signal-regulated kinases (ERKs), and their regulatory subunits, PMSA, PR-3, MDM2, Mesothelin, renal cell carcinoma-5T4, SM22-alpha, carbonic anhydrases I (CAI) and IX (CAIX) (also known as G250), STEAD, TEL/AML1, GD2, proteinase3, hTERT, sarcoma translocation breakpoints, EphA2, ML-IAP, EpCAM, ERG (TMPRSS2 ETS fusion gene), NA17, PAX3, ALK, androgen receptor, cyclin B1, polysialic acid, MYCN, RhoC, GD3, fucosyl GM1, mesothelian, PSCA, sLe, PLAC1, GM3, BORIS, Tn, GLoboH, NY-BR-1, RGsS, SART3, STn, PAX5, OY-TES1, sperm protein 17, LCK, HMWMAA, AKAP-4, SSX2, XAGE 1, B7H3, legumain, TIE2, Page4, MAD-CT-1, FAP, MAD-CT-2, fos related antigen 1, CBX2, CLDN6, SPANX, TPTE, ACTL8, ANKRD30A, CDK 2A, MAD2L1, CTAGIB, SUNC1, LRRN1 and idiotype.

[0150] Antigens may include epitopic regions or epitopic peptides derived from genes mutated in tumor cells or from genes transcribed at different levels in tumor cells compared to normal cells, such as telomerase enzyme, survivin, mesothelin, mutated ras, bcr/abl rearrangement, Her2/neu, mutated or wild-type p53, cytochrome P450 1B1, and abnormally expressed intron sequences such as N-acetylglucosaminyltransferase-V; clonal rearrangements of immunoglobulin genes generating unique idiotypes in myeloma and B-cell lymphomas; tumor antigens that include epitopic regions or epitopic peptides derived from oncoviral processes, such as human papilloma virus proteins E6 and E7; Epstein bar virus protein LMP2; nonmutated oncofetal proteins with a tumor-selective expression, such as carcinoembryonic antigen and alpha-fetoprotein.

[0151] In other embodiments, an antigen is obtained or derived from a pathogenic microorganism or from an opportunistic pathogenic microorganism (also called herein an infectious disease microorganism), such as a virus, fungus, parasite, and bacterium. In certain embodiments, antigens derived from such a microorganism include full-length proteins.

[0152] Illustrative pathogenic organisms whose antigens are contemplated for use in the method described herein include human immunodeficiency virus (HIV), herpes simplex virus (HSV), respiratory syncytial virus (RSV), cytomegalovirus (CMV), Epstein-Barr virus (EBV), Influenza A, B, and C, vesicular stomatitis virus (VSV), vesicular stomatitis virus (VSV), Staphylococcus species including Methicillin-resistant Staphylococcus aureus (MRSA), and Streptococcus species including Streptococcus pneumoniae. As would be understood by the skilled person, proteins derived from these and other pathogenic microorganisms for use as antigen as described herein and nucleotide sequences encoding the proteins may be identified in publications and in public databases such as GENBANK®, SWISS-PROT®, and TREMBL®.

[0153] Antigens derived from human immunodeficiency virus (HIV) include any of the HIV virion structural proteins (e.g., gpl20, gp41, p17, p24), protease, reverse transcriptase, or HIV proteins encoded by tat, rev, nef, vif, vpr and vpu.

[0154] Antigens derived from herpes simplex virus (e.g., HSV 1 and HSV2) include, but are not limited to, proteins expressed from HSV late genes. The late group of genes predominantly encodes proteins that form the virion particle. Such proteins include the five proteins from (UL) which form the viral capsid: UL6, UL18, UL35, UL38 and the major capsid protein UL19, UL45, and UL27, each of which may be used as an antigen as described herein. Other illustrative HSV proteins contemplated for use as antigens herein include the ICP27 (HI, H2), glycoprotein B (gB) and glycoprotein D (gD) proteins. The HSV genome comprises at least 74 genes, each encoding a protein that could potentially be used as an antigen.

[0155] Antigens derived from cytomegalovirus (CMV) include CMV structural proteins, viral antigens expressed during the immediate early and early phases of virus replication, glycoproteins I and III, capsid protein, coat protein, lower matrix protein pp65 (ppUL83), p52 (ppUL44), IE1 and 1E2 (UL123 and UL122), protein products from the cluster of genes from UL128-UL150 (Rykman, et al., 2006), envelope glycoprotein B (gB), gH, gN, and ppl50. As would be understood by the skilled person, CMV proteins for use as antigens described herein may be identified in public databases such as GENBANK®, SWISS-PROT®, and TREMBL® (see e.g., Bennekov et al., 2004; Loewendorf et al., 2010; Marschall et al, 2009).

[0156] Antigens derived from Epstein-Ban virus (EBV) that are contemplated for use in certain embodiments include EBV lytic proteins gp350 and gpl 10, EBV proteins produced during latent cycle infection including Epstein-Ban nuclear antigen (EBNA)-1, EBNA-2, EBNA-3A, EBNA-3B, EBNA-3C, EBNA-leader protein (EBNA-LP) and latent membrane proteins (LMP)-1, LMP-2A and LMP-2B (see, e.g., Lockey et al., 2008).

[0157] Antigens derived from respiratory syncytial virus (RSV) that are contemplated for use herein include any of the eleven proteins encoded by the RSV genome, or antigenic fragments thereof: NS 1, NS2, N (nucleocapsid protein), M (Matrix protein) SH, G and F (viral coat proteins), M2 (second matrix protein), M2-1 (elongation factor), M2-2 (transcription regulation), RNA polymerase, and phosphoprotein P.

[0158] Antigens derived from Vesicular stomatitis virus (VSV) that are contemplated for use include any one of the five major proteins encoded by the VSV genome, and antigenic fragments thereof: large protein (L), glycoprotein (G), nucleoprotein (N), phosphoprotein (P), and matrix protein (M) (see, e.g., Rieder et al., 1999).

[0159] Antigens derived from an influenza virus that are contemplated for use in certain embodiments include hemagglutinin (HA), neuraminidase (NA), nucleoprotein (NP), matrix proteins M1 and M2, NS1, NS2 (NEP), PA, PB1, PB1-F2, and PB2.

[0160] Exemplary viral antigens also include, but are not limited to, adenovirus polypeptides, alphavirus polypeptides, calicivirus polypeptides (e.g., a calicivirus capsid antigen), coronavirus polypeptides, distemper virus polypeptides, Ebola virus polypeptides, enterovirus polypeptides, flavivirus polypeptides, hepatitis virus (AE) polypeptides (a hepatitis B core or surface antigen, a hepatitis C virus El or E2 glycoproteins, core, or nonstructural proteins), herpesvirus polypeptides (including a herpes simplex virus or varicella zoster virus glycoprotein), infectious peritonitis virus polypeptides, leukemia virus polypeptides, Marburg virus polypeptides, orthomyxovirus polypeptides, papilloma virus polypeptides, parainfluenza virus polypeptides (e.g., the hemagglutinin and neuraminidase polypeptides), paramyxovirus polypeptides, parvovirus polypeptides, pestivirus polypeptides, pi coma virus polypeptides (e.g., a poliovirus capsid polypeptide), pox virus polypeptides (e.g., a vaccinia virus polypeptide), rabies virus polypeptides (e.g., a rabies virus glycoprotein G), reovirus polypeptides, retrovirus polypeptides, and rotavirus polypeptides.

[0161] In certain embodiments, the antigen may be bacterial antigens. In certain embodiments, a bacterial antigen of interest may be a secreted polypeptide. In other certain embodiments, bacterial antigens include antigens that have a portion or portions of the polypeptide exposed on the outer cell surface of the bacteria.

[0162] Antigens derived from Staphylococcus species including Methicillin-resistant Staphylococcus aureus (MRSA) that are contemplated for use include virulence regulators, such as the Agr system, Sar and Sae, the Arl system, Sar homologues (Rot, MgrA, SarS, SarR, SarT, SarU, SarV, SarX, SarZ and TcaR), the Srr system and TRAP. Other Staphylococcus proteins that may serve as antigens include Clp proteins, HtrA, MsrR, aconitase, CcpA, SvrA, Msa, CfvA and CfvB (see, e.g., Staphylococcus: Molecular Genetics, 2008 Caister Academic Press, Ed. Jodi Lindsay). The genomes for two species of Staphylococcus aureus (N315 and Mu50) have been sequenced and are publicly available, for example at PATRIC (PATRIC: The VBI PathoSystems Resource Integration Center, Snyder et al., 2007). As would be understood by the skilled person, Staphylococcus proteins for use as antigens may also be identified in other public databases such as GENBANK®, SWISS-PROT®, and TREMBL®.

[0163] Antigens derived from Streptococcus pneumoniae that are contemplated for use in certain embodiments described herein include pneumolysin, PspA, choline-binding protein A (CbpA), NanA, NanB, SpnHL, PavA, LytA, Pht, and pilin proteins (RrgA; RrgB; RrgC). Antigenic proteins of Streptococcus pneumoniae are also known in the art and may be used as an antigen in some embodiments (Zysk et al, 2000). The complete genome sequence of a virulent strain of Streptococcus pneumoniae has been sequenced and, as would be understood by the skilled person, S. pneumoniae proteins for use herein may also be identified in other public databases such as GENBANK®, SWISS-PROT®, and TREMBL®. Proteins of particular interest for antigens according to the present disclosure include virulence factors and proteins predicted to be exposed at the surface of the pneumococci (Frolet et al., 2010).

[0164] Examples of bacterial antigens that may be used as antigens include, but are not limited to, Actinomyces polypeptides, Bacillus polypeptides, Bacteroides polypeptides, Bordetella polypeptides, Bartonella polypeptides, Borrelia polypeptides (e.g., B. burgdorferi OspA), Brucella polypeptides, Campylobacter polypeptides, Capnocytophaga polypeptides, Chlamydia polypeptides, Corynebacterium polypeptides, Coxiella polypeptides, Dermatophilus polypeptides, Enterococcus polypeptides, Ehrlichia polypeptides, Escherichia polypeptides, Francisella polypeptides, Fusobacterium polypeptides, Haemobartonella polypeptides, Haemophilus polypeptides (e.g., H. influenzae type b outer membrane protein), Helicobacter polypeptides, Klebsiella polypeptides, L-form bacteria polypeptides, Leptospira polypeptides, Listeria polypeptides, Mycobacterium polypeptides, Mycoplasma polypeptides, Neisseria polypeptides, Neorickettsia polypeptides, Nocardia polypeptides, Pasteurella polypeptides, Peptococcus polypeptides, Peptostreptococcus polypeptides, Pneumococcus polypeptides (i.e., S. pneumoniae polypeptides), Proteus polypeptides, Pseudomonas polypeptides, Rickettsia polypeptides, Rochalimaea polypeptides, Salmonella polypeptides, Shigella polypeptides, Staphylococcus polypeptides, group A streptococcus polypeptides (e.g., S. pyogenes M proteins), group B streptococcus (S. agalactiae) polypeptides, Treponema polypeptides, and Yersinia polypeptides (e.g., Y. pestis Fl and V antigens).

[0165] Examples of fungal antigens include, but are not limited to, Absidia polypeptides, Acremonium polypeptides, Alternaria polypeptides, Aspergillus polypeptides, Basidiobolus polypeptides, Bipolaris polypeptides, Blastomyces polypeptides, Candida polypeptides, Coccidioides polypeptides, Conidiobolus polypeptides, Cryptococcus polypeptides, Curvalaria polypeptides, Epidermophyton polypeptides, Exophiala polypeptides, Geotrichum polypeptides, Histoplasma polypeptides, Madurella polypeptides, Malassezia polypeptides, Microsporum polypeptides, Moniliella polypeptides, Mortierella polypeptides, Mucor polypeptides, Paecilomyces polypeptides, Penicillium polypeptides, Phialemonium polypeptides, Phialophora polypeptides, Prototheca polypeptides, Pseudallescheria polypeptides, Pseudomicrodochium polypeptides, Pythium polypeptides, Rhinosporidium polypeptides, Rhizopus polypeptides, Scolecobasidium polypeptides, Sporothrix polypeptides, Stemphylium polypeptides, Trichophyton polypeptides, Trichosporon polypeptides, and Xylohypha polypeptides.

[0166] Examples of protozoan parasite antigens include, but are not limited to, Babesia polypeptides, Balantidium polypeptides, Besnoitia polypeptides, Cryptosporidium polypeptides, Eimeria polypeptides, Encephalitozoon polypeptides, Entamoeba polypeptides, Giardia polypeptides, Hammondia polypeptides, Hepatozoon polypeptides, Isospora polypeptides, Leishmania polypeptides, Microsporidia polypeptides, Neospora polypeptides, Nosema polypeptides, Pentatrichomonas polypeptides, Plasmodium polypeptides. Examples of helminth parasite antigens include, but are not limited to, Acanthocheilonema polypeptides, Aelurostrongylus polypeptides, Ancylostoma polypeptides, Angiostrongylus polypeptides, Ascaris polypeptides, Brugia polypeptides, Bunostomum polypeptides, Capillaria polypeptides, Chabertia polypeptides, Cooperia polypeptides, Crenosoma polypeptides, Dictyocaulus polypeptides, Dioctophyme polypeptides, Dipetalonema polypeptides, Diphyllobothrium polypeptides, Diplydium polypeptides, Dirofilaria polypeptides, Dracunculus polypeptides, Enterobius polypeptides, Filaroides polypeptides, Haemonchus polypeptides, Lagochilascaris polypeptides, Loa polypeptides, Mansonella polypeptides, Muellerius polypeptides, Nanophyetus polypeptides, Necator polypeptides, Nematodirus polypeptides, Oesophagostomum polypeptides, Onchocerca polypeptides, Opisthorchis polypeptides, Ostertagia polypeptides, Parafilaria polypeptides, Paragonimus polypeptides, Parascaris polypeptides, Physaloptera polypeptides, Protostrongylus polypeptides, Setaria polypeptides, Spirocerca polypeptides Spirometra polypeptides, Stephanofilaria polypeptides, Strongyloides polypeptides, Strongylus polypeptides, Thelazia polypeptides, Toxascaris polypeptides, Toxocara polypeptides, Trichinella polypeptides, Trichostrongylus polypeptides, Trichuris polypeptides, Uncinaria polypeptides, and Wuchereria polypeptides, (e.g., P. falciparum circumsporozoite (PfCSP)), sporozoite surface protein 2 (PfSSP2), carboxyl terminus of liver state antigen 1 (PfLSAl c-term), and exported protein 1 (PfExp-1), Pneumocystis polypeptides, Sarcocystis polypeptides, Schistosoma polypeptides, Theileria polypeptides, Toxoplasma polypeptides, and Trypanosoma polypeptides.

[0167] Examples of ectoparasite antigens include, but are not limited to, polypeptides (including antigens as well as allergens) from fleas; ticks, including hard ticks and soft ticks; flies, such as midges, mosquitoes, sand flies, black flies, horse flies, horn flies, deer flies, tsetse flies, stable flies, myiasis-causing flies and biting gnats; ants; spiders, lice; mites; and true bugs, such as bed bugs and kissing bugs.

[0168] In some embodiments, the antigen is an autoantigen. In one embodiment, the autoantigen is a type 1 diabetes autoantigen, including, but not limited to, insulin, pre-insulin, PTPRN, PDX1, ZnT8, CHGA IAAP, GAD(65) and/or DiaPep277. In one embodiment, the autoantigen is an alopecia areata autoantigen, including, but not limited to, keratin 16, K18585, M1 0510, J01523, 022528, D04547, 005529, B20572 and/or F11552. In one embodiment, the autoantigen is a systemic lupus erythematosus autoantigen, including, but not limited to, TRIM21/Ro52/SS-A 1 and/or histone H2B. In one embodiment, the autoantigen is a Behcet's disease autoantigen, including, but not limited to, S-antigen, alpha-enolase, selenium binding partner and/or Sipl C-ter. In one embodiment, the autoantigen is a Sjogren's syndrome autoantigen, including, but not limited to, La/SSB, KLK11 and/or a 45-kd nucleus protein. In one embodiment, the autoantigen is a rheumatoid arthritis autoantigen, including, but not limited to, vimentin, gelsolin, alpha 2 HS glycoprotein (AHSG), glial fibrillary acidic protein (GFAP), alB-glycoprotein (A1BG), RA33 and/or citrullinated 31F4G1. In one embodiment, the autoantigen is a Grave's disease autoantigen. In one embodiment, the autoantigen is an antiphospholipid antibody syndrome autoantigen, including, but not limited to, zwitterionic phospholipids, phosphatidyl-ethanolamine, phospholipid-binding plasma protein, phospholipid-protein complexes, anionic phospholipids, cardiolipin, β2-glycoprotein I (β2GPI), phosphatidylserine, lyso(bis)phosphatidic acid, phosphatidylethanolamine, vimentin and/or annexin A5. In one embodiment, the autoantigen is a multiple sclerosis autoantigen, including, but not limited to, myelin-associated oligodendrocytic basic protein (MOBP), myelin basic protein (MBP), myelin proteolipid protein (PLP), myelin oligodendrocyte glycoprotein (MOG) and/or alpha-B-crytallin. In one embodiment, the autoantigen is an irritable bowel disease autoantigen, including, but not limited to, a ribonucleoprotein complex, a small nuclear ribonuclear polypeptide A and/or Ro-5,200 kDa. In one embodiment, the autoantigen is a Crohn's disease autoantigen, including, but not limited to, zymogen granule membrane glycoprotein 2 (GP2), an 84 by allele of CTLA-4 AT repeat polymorphism, MRP 8, MRP 14 and/or complex MRP8/14. In one embodiment, the autoantigen is a dermatomyositis autoantigen, including, but not limited to, aminoacyl-tRNA synthetases, Mi-2 helicase/deacetylase protein complex, signal recognition particle (SRP), T2F1-Y, MDAS, NXP2, SAE and/or HMGCR. In one embodiment, the autoantigen is an ulcerative colitis autoantigen, including, but not limited to, 7E12H12 and/or M(r) 40 kD autoantigen.

[0169] In some embodiments, the autoantigen is a collagen, e.g., collagen type II; other collagens such as collagen type IX, collagen type V, collagen type XXVII, collagen type XVIII, collagen type IV, collagen type IX; aggrecan I; pancreas-specific protein disulphide isomerise A2; interphotoreceptor retinoid binding protein (IRBP); a human IRBP peptide 1-20; protein lipoprotein; insulin 2; glutamic acid decarboxylase (GAD) 1 (GAD67 protein), BAFF, IGF2. Further examples of autoantigens include ICA69 and CYP1A2, Tph and Fabp2, Tgn, Sptl & 2 and Mater, and the CB11 peptide from collagen.

[0170] In some aspects, the peptide antigens are continuous segments of a protein. In other aspects, the peptide antigen comprises multiple segments from the same or different proteins. The multiple segments can bind to MHC and form a linear peptide sequence. The peptide sequence may be informatically predicted to bind to a certain MHC allele. The peptide sequence may be experimentally validated.

### C. Isolation by DNA-pMHC Multimers

[0171] In some embodiments, the present disclosure provides a DNA-pMHC multimer for isolation of antigen-specific T cells. The DNA-pMHC multimer may comprise a multimer backbone, multiple pMHCs, and a peptide-encoding oligonucleotide, optionally comprising a DNA handle comprise a DNA barcode.

[0172] The multimer backbone may comprise multiple protein subunits to which MHC, a peptide-encoding oligonucleotide, and/or a DNA barcode are attached. The multimer backbone may comprise 2-20 subunits, such as 2, 3, 4, 5, 6, 7, 8, 9, 10, 11, 12, 13, 14, 15, 16, 17, 18, 19, or 20 subunits. The protein subunits may be comprised of streptavidin or a glucan, such as dextran.

[0173] The multimer backbone may be attached to 2 or more MHCs, such as 2-20, such as 2, 3, 4, 5, 6, 7, 8, 9, 10, 11, 12, 13, 14, 15, 16, 17, 18, 19, or 20 MHCs. In particular aspects, the multimer backbone is a tetramer, pentamer, octamer, or dodecamer. The MHC may be a class I MHC, a class II MHC, a CD1, or a MHC-like molecule. For MHC class I the presenting peptide is a 9-11 mer peptide; for MHC class II, the presenting peptide is 12-18mer peptides. For alternative MHC-molecules it may be fragments from lipids or gluco-molecules which are presented. In some aspects, the multimer backbone is a PRO5 MHC Class I Pentamer (PROIMMUNE®), a dodecamer comprising a biotinylated scaffold protein linked to four streptavidin tetramers, each capable of binding three biotinylated pMHC monomers (Huang et al., PNAS, 113(13); E1890-E1897, 2016), a MHC I streptamer (Iba), or a MHC-dextramer (Immudex).

[0174] In some aspects, the multimer backbone is a tetravalent conjugates (e.g., MHC I STREPTAMERS®) which comprise four identical subunits of a single ligand (e.g., peptide-major histocompatibility complexes (pMHC)) which specifically binds to the TCR and has a detectable label.

[0175] The multimer backbone may be attached to one or more peptide-encoding oligonucleotides. The peptide encoded by the oligonucleotide preferably has the same sequence as the peptide for the peptide of the pMHC complex. The peptide-encoding oligonucleotide may be linked to the multimer backbone through a DNA handle, referred to herein as a DNA oligonucleotide segment comprising at least one primer set for amplifying the oligonucleotide. The DNA handle may further encode a partial FLAG peptide. In particular aspects, the DNA handle further comprises a 10-14, such as 12, base pair degenerate region that serves as a unique molecular identifier or barcode. In some embodiments, there is provided a multimer backbone linked to a DNA handle. Thus, the peptide maybe be identified by sequencing rather than flow cytometry.

[0176] Further provided herein are methods for producing a DNA-pMHC multimer comprising the multimer backbone attached to multiple MHCs and the peptide-encoding oliconucleotide which can comprise the DNA handle. The peptide of the pMHC may havea length of about 8 to about 25 amino acids and may comprise anchor amino acid residues capable of allele-specific binding to a predetermined MHC molecule class, e.g. an MHC class I, an MHC class II or a non-classical MHC class. In particular aspects, the MHC molecule is an MHC class I molecule. Included in the HLA proteins are the class II subunits HLA-DPa, HLA-\ddot{ν}Pβ, HLA-DQa, HLA-DQ, HLA-DRa and HLA-DR, and the class I proteins HLA-A, HLA-B, HLA-C, and β2-microglobulin. The peptides of the pMHC complex may have a sequence derived from a wide variety of proteins. The T cell epitopic sequences from a number of antigens are known in the art. Alternatively, the epitopic sequence may be empirically determined, by isolating and sequencing peptides bound to native MHC proteins, by synthesis of a series of peptides from the target sequence, then assaying for T cell reactivity to the different peptides, or by producing a series of binding complexes with different peptides and quantitating the T cell binding. Alternatively, the epitopic sequence may be informatically predicted to bind to certain MHC alleles. Preparation of fragments, identifying sequences, and identifying the minimal sequence is described in U.S. Pat. No. 5,019,384; incorporated herein by reference. The peptides may be prepared in a variety of ways. Conveniently, they can be synthesized by conventional techniques employing automatic synthesizers, or may be synthesized manually. Alternatively, DNA sequences can be prepared which encode the particular peptide. The peptides may be generated by in vitro transcription/translation from the known DNA sequence. Alternatively, the DNA sequence may be cloned and expressed to provide the desired peptide. In this instance a methionine may be the first amino acid. In addition, peptides may be produced by recombinant methods as a fusion to proteins that are one of a specific binding pair, allowing purification of the fusion protein by means of affinity reagents, followed by proteolytic cleavage, usually at an engineered site to yield the desired peptide (see, e.g., Driscoll et al., 1993). The peptides may also be isolated from natural sources and purified by known techniques, including, for example, chromatography on ion exchange materials, separation by size, immunoaffinity chromatography and electrophoresis.

[0177] In one embodiment, a synthetic single-stranded DNA oligonucleotide that encodes the peptide is obtained and is utilized as a DNA template to produce the peptide using in vitro transcription/translation (IVTT) (Shimzu et al., Nat Biotechnol, 19(8): 751-5, 2001) and as the peptide-encoding oligonucleotide attached to the DNA-pMHC multimer.

[0178] For the IVTT, the peptide-encoding oligonucleotide may be amplified by polymerase chain reaction (PCR) to include adapters that allows for IVTT. The peptide-encoding sequence may comprise a partial FLAG peptide at the N-terminus, followed by the peptide of interest. During IVTT, enterokinase may be added to the solution to cleave off the FLAG peptide so that peptides without a methionine at the P1 position of the N-terminus can be produced. After IVTT, a biotinylated pMHC monomer containing a temporary peptide, such as a UV-cleavable peptide, may be added to the solution. The temporary peptide can then be switched with the target peptide.

[0179] In some aspects, MHC monomers can be generated which allow for conditional release of the MHC ligand, such as by UV irradiation (Rodenko et al., 2006) for switching the temporary and target peptides. This UV switching method comprises exposing the solution to UV light, allowing for dissociation of the temporary UV-cleavable peptide and association of the MHC with the target peptide produced by IVTT.

[0180] In other aspects, the exchange of the temporary peptide may be by chemical methods, such as biorthogonal cleavage and exchange by employing azobenzene-containing peptides (Choo et al., Angewandte Chemie International Edition, 53(49), 2014). In another method, the peptide of the pMHC may be exchanged with the target peptide by re-folding of the MHC protein in the presence of the target peptide to produce the desired pMHC (Leisner et al., PLOS One, 2008). Alternatively, the pMHC may be generated by using CLIP peptide exchange for MHC Class II (Day et al., J Clin Invest, 112)6) 831-42, 2003). In some aspects, the pMHCs may be generated by using the QUICKSWITCH™ Custom Tetramer Kit or the FLET-T™ Kit. In other aspects, the peptide of the pMHC may be exchanged with the target peptide by temperature change of the MHC protein in the presence of the target peptide to produce the desired pMHC (Luimstra et al., 2018).

[0181] In the second part of the method for producing the DNA-pMHC multimer, the peptide-encoding oligonucleotide may be annealed to a linker oligonucleotide (or DNA handle) and gap-filled using a polymerase to create a double-stranded fragment. The peptide-encoding oligonucleotide or DNA handle may be attached to the multimer backbone by methods known in the art, such as through covalent interactions, such as by a HyNic-4FB crosslink or Tetrazine-TCO crosslink, or by streptavidin-biotin interactions. In one method, the DNA handle is attached to the multimer backbone using SOLULINK®. The multimer backbone, such as streptavidin tetramer, and the oligonucleotide may be added at a molar ratio of 0.1-20, such as 3-7, such as 0.1, 3, 4, 5, 5.8, 6, or, 7, or more or fewer multimers to each oligonucleotide. The excess oligonucleotide may be removed by wash steps, such as 1, 2, 3, 4, 5, 6, 7, 8, 9, or 10, particularly 6, wash steps in a protein concentrator.

[0182] In one specific method, the linker oligonucleotide or DNA handle itself is already covalently linked to a R-phycoerythrin-streptavidin or Allophycocyanin-streptavidin conjugate. The linker sequence or DNA handle may comprise of (1) a region that's complementary to the peptide-encoding oligonucleotide, (2) a 12 base pair degenerate region that serves as a unique molecular identifier, and (3) a primer region. The resulting product is a MHC multimer, such as a fluorescent streptavidin conjugate, that is covalently linked to a double stranded DNA fragment containing the peptide-encoding sequence.

[0183] To create the final DNA-pMHC tetramer, the pMHC multimer, such as a fluorescent streptavidin conjugate, from the second part of the method is added to the IVTT solution in the first part of the method that contains the biotinylated pMHC to produce the final DNA-pMHC tetramer.

[0184] The multimer backbone may be labeled by one or more detectable labels, such as one or more fluorophores. Exemplary fluorophores include PE, PE-Cy5, PE-Cy7, APC, APC-Cy7, QDOT® 565, QDOT® 605, QDOT® 655, QDOT® 705, Brilliant Violet (BV) 421, BV 605, BV 510, BV 711, BV786, PerCP, PerCP/Cy5.5, Alexa Fluor® 488, Alexa Fluor® 647, FITC, BV570, BV650, DYLIGHTt 488, DYLIGHT 649, and PE/DAZZLE®594.

[0185] The labeled pMHC multimer may be free in solution, or may be attached to an insoluble support. Examples of suitable insoluble supports include beads, e.g. magnetic beads, membranes and microliter plates. These are typically made of glass, plastic (e.g. polystyrene), polysaccharides, nylon or nitrocellulose. In general, the label will have a light detectable characteristic. Preferred labels are fluorophores, such as fluorescein isothiocyanate (FITC), rhodamine, TEXAS RED®, phycoerythrin and allophycocyanin. Other labels of interest may include dyes, enzymes, chemiluminescers, particles, radioisotopes, nucleic acids or other directly or indirectly detectable agent.

[0186] A number of methods for detection and quantitation of labeled cells are known in the art. Flow cytometry is a convenient means of enumerating cells that are a small percent of the total population. Fluorescent microscopy may also be used. Various immunoassays, e.g. ELISA, RIA, etc. may be used to quantitate the number of cells present after binding to an insoluble support. In particular aspects, flow cyometry is used for the separation of a labeled subset of T cells from a complex mixture of cells.

[0187] Alternative means of separation utilize the binding complex bound directly or indirectly to an insoluble support, e.g. column, microtiter plate, magnetic beads, etc. The cell sample is added to the binding complex. The complex may be bound to the support by any convenient means. After incubation, the insoluble support is washed to remove non-bound components. From one to six washes may be employed, with sufficient volume to thoroughly wash non-specifically bound cells present in the sample. The desired cells are then eluted from the binding complex. In particular the use of magnetic particles to separate cell subsets from complex mixtures is described in Miltenyi et al, 1990.

[0188] In some embodiments, the T cells which bind the specific pMHC can then be isolated by sorting for the detectable label. The separation of T cell, from other sample components, e.g. unstained T cells may be effected by conventional methods, e.g. cell sorting, preferably by FACS methods using commercially available systems (e.g. FACSVantage by Becton Dickinson or MOFLO® by Cytomation), or by magnetic cell separation (e.g. MACS™ by Miltenyi). The staining may be removed from the T cell by disruption of the reversible bond which results in a complete removal of any reagent bound to the target cell, because the bond between the receptor-binding component and the receptor on the target cell is a low-affinity interaction.

[0189] Further provided herein are methods of using the DNA-pMHC multimer by contacting it to T cells. T cells bearing a TCR that binds to the particular target pMHC will bind to the DNA-pMHC multimer. The T cell bound-DNA-pMHC multimer is then sorted into lysis buffer based on the detectable label, such as fluorescence. An amplification scheme may then be used to prepare a DNA library, consisting of both the TCR sequence and the DNA barcode, which can be sequenced using next generation sequencing platforms (TetTCR-seq).

[0190] The TetTCR-seq may be used to identify non-cross reactive, neoantigen-specific TCR sequences. DNA-pMHC multimers containing the neoantigen peptide are produced in one fluorescent channel (e.g., Allophycocyanin/R-Phycoerythrin), and the corresponding DNA-pMHC multimer containing the wildtype peptide are produced in another fluorescent channel. Multiple neoantigen/wildtype DNA-pMHC multimer pairs can be included in the same two fluorescent channels and in the same staining solution, since the peptide can be deconvoluted at the sequence level.

### III. TCR SEQUENCING

[0191] Methods are also provided herein for the sequencing of the TCR. In some embodiments, methods are provided for the simultaneous sequencing of TCRα and TCRβ genes, DNA-barcode encoding for antigenic peptide sequences, and amplification of transcripts of functional interest in the single T cells which enable linkage of TCR specificity with information about T cell function. The methods generally involve sorting of single T cells into separate locations (e.g., separate wells of a multi-well titer plate) followed by nested polymerase chain reaction (PCR) amplification of nucleic acids encoding TCRs, DNA-barcode encoding for antigenic peptide sequences and T cell phenotypic markers. The amplicons are barcoded to identify their cell of origin, combined, and analyzed by deep sequencing.

[0192] In one method, a nested PCR approach is used in combination with deep sequencing such as described in Han et al., incorporated herein by reference, with modifications. Briefly, single T cells are sorted into separate wells (e.g., 96- or 384-well PCR plate) and reverse transcription is performed using TCR primers and phenotyping primers. In order to amplify unknown TCR sequences, ligation anchor PCR may be used. One amplification primer is specific for a TCR constant region. The other primer is ligated to the terminus of cDNA synthesized from TCR encoding mRNA. The variable region is amplified by PCR between the constant region sequence and the ligated primer. Included in this first reaction are also primers to serve as hybridization locations for barcoding primers in subsequent amplification reactions. Next, nested PCR is performed with TCRα/TCR primers (e.g., sequences in Table 1) and a third reaction is performed to incorporate individual barcodes. The products are combined, purified and sequenced using a next generation sequencing platform, such as but not limited to the ILLUMINA® HiSEQ™ system (e.g., HiSEQ2000™ and HiSEQIOOO™), the MiSEQ™ system and SOLEXA sequencing, Helicos True Single Molecule Sequencing (tSMS), the ROCHE454™ sequencing platform and Genome Sequencer FLX systems, the Life Technology SOLiD sequencing platform and IonTorrent system, the single molecule, real-time (SMRT™) technology of PACIFIC BIOSCIENCE^{T}M, and nanopore sequencing. The resulting paired-end sequencing reads are assembled and deconvoluted using barcode identifiers at both ends of each sequence by a custom software pipeline to separate reads from every well in every plate. For TCR sequences, the CDR3 nucleotide sequences are then extracted and translated.

### IV. PRODUCTION OF T CELL LINES

[0193] Methods are also provided herein for the generation of T cell lines. In some embodiments, methods are provided for the generation of T cell lines using a DNA-BC pMHC multimer pool. The methods will generally involve separation of T cells from PBMCs, concentration, stimulation of T cells with DNA-BC pMHC multimers comprising antigens of interest, and sorting them by flow cytometry. Stimulated T cells may then be cultured for use in subsequent experiments.

[0194] In one method, T cell lines are generated according to previously published protocol (Yu et al., 2015; Zhang et al., 2016), but using the DNA-BC pMHC multimer pool to stimulate and provide a functional fluorophore for subsequent separation. Cells may then be gated by flow cytometry. Single or 5 or more cells from the same population (Neo⁺WT⁻, Neo⁻WT⁺, Neo⁺WT⁺) may be sorted into each well for subsequent culture.

### V. RNA SEQUENCING

[0195] RNA sequencing (RNA-seq) is a well-established method for analyzing gene expression. A variety of methodologies for RNA-seq exist. See, for example, U.S. patent application Ser. No. 14/912,556, U.S. Pat. No. 5,962,272, both of which are incorporated herein by reference. Generally, methods for RNA-seq begin by generating a cDNA from the RNA by reverse transcription. In this process, a primer is hybridized to the 3′ end of the RNA, and a reverse transcriptase extends from the primer, synthesizing complementary DNA. A second primer then hybridizes to the 3′ end of the nascent cDNA, and either a DNA polymerase, or the same reverse transcriptase extends from the primer, and synthesizes a complementary strand, thereby generating double stranded DNA, after which logarithmic amplification can begin (i.e. PCR). Many methods of cDNA synthesis utilize the poly(A) tail of the mRNA as the starting point for cDNA synthesis and utilize a first primer which has a stretch of T nucleotides, complementary to the poly(A) tail. Some methods then use random primers as the other primers, though this has proved to cause consistent bias. As practiced in U.S. patent application Ser. No. 14/912,556 and U.S. Pat. No. 5,962,272, certain reverse transcriptases can add extra non-templated nucleotides to the end of a sequence, and then switch templates to a primer which binds there. This allows for the addition of the second primer, with very low bias.

[0196] Further embodiments of the present disclosure concern highly multiplexed 3′ end RNA sequencing to analyze the gene expression of a plurality of single cells (FIG. 23). These methods use the template switch activity of particular reverse transcriptases, as described above, to add a template switch primer comprising a restriction endonuclease site. The reverse transcription (RT) primer includes a cellular barcode and a restriction enzyme (e.g., SalI or SpeI) site is incorporated on the template switching oligo (TSO). In one method, the RT primer and the template switch primer comprise the sequences in Table 1. RT primers with unique cell barcodes may then be individually dispensed into wells. These wells may be in a 96-, 384, or nanowell plate. Target cells are then sorted by FACS, adding single cells to each well or by dispersing. These cells are then lysed. cDNA amplification is performed similarly to the SMART-SEQ2© protocol, but with the primers provided in Table 1 (Picelli et al., 2013). After cDNA amplification, multiple single cell PCR products are pooled, each of which has the unique cell barcode at the 3′ end to differentiate the individual cells during analysis. After purification, PCR products are digested by restriction enzyme incubation. Digested products may be used for preparing a DNA library, such as by using a modified NEXTERA® XT DNA library prep kit, where custom primers designed to enrich 3′ end are used to prepare sequencing libraries.

TABLE 1
Oligo Sequences.

| Oligo # | Oligo sequences 5′ to 3′ |
|---|---|
| SEQ ID | /5AmMC12//iSp18/ TAG TAC TCA GAG GTT GAT CTA CAT TG (N:25252525)(N)(N) (N)(N)(N) |
| NO. 1 | (N)(N)(N)(N)(N)(N) GAC GAT GAC GAC AAG |
| SEQ ID | GCG AAT TAA TAC GAC TCA CTA TAG GGC TTA AGT ATA AGG AGG AAA ACA T ATG GAC GAT |
| NO. 2 | GAC GAC AAG |
| SEQ ID | AAA CCC CTC CGT TTA GAG AGG GGT TA TGC TAG CGA GGT GCT TCG TTA |
| NO. 3 | |
| SEQ ID | TCA GAG GTT GAT CTA CAT TG |
| NO. 4 | |
| SEQ ID | AG CGA GGT GCT TCG TTA |
| NO. 5 | |
| SEQ ID | GACGTGTGCTCTTCCGATCT NHNHN ATCACG TAC TCA GAG GTT GAT CTA CAT TG |
| NO. 6 | |
| SEQ ID | GACGTGTGCTCTTCCGATCT NHNHN CGATGT TAC TCA GAG GTT GAT CTA CAT TG |
| NO. 7 | |
| SEQ ID | GACGTGTGCTCTTCCGATCT NHNHN TTAGGC TAC TCA GAG GTT GAT CTA CAT TG |
| NO. 8 | |
| SEQ ID | GACGTGTGCTCTTCCGATCT NHNHN TGACCA TAC TCA GAG GTT GAT CTA CAT TG |
| NO. 9 | |
| SEQ ID | GACGTGTGCTCTTCCGATCT NHNHN ACAGTG TAC TCA GAG GTT GAT CTA CAT TG |
| NO. 10 | |
| SEQ ID | GACGTGTGCTCTTCCGATCT NHNHN GCCAAT TAC TCA GAG GTT GAT CTA CAT TG |
| NO. 11 | |
| SEQ ID | GACGTGTGCTCTTCCGATCT NHNHN CAGATC TAC TCA GAG GTT GAT CTA CAT TG |
| NO. 12 | |
| SEQ ID | GACGTGTGCTCTTCCGATCT NHNHN ACTTGA TAC TCA GAG GTT GAT CTA CAT TG |
| NO. 13 | |
| SEQ ID | GACGTGTGCTCTTCCGATCT NHNHN GATCAG TAC TCA GAG GTT GAT CTA CAT TG |
| NO. 14 | |
| SEQ ID | GACGTGTGCTCTTCCGATCT NHNHN TAGCTT TAC TCA GAG GTT GAT CTA CAT TG |
| NO. 15 | |
| SEQ ID | GACGTGTGCTCTTCCGATCT NHNHN GGCTAC TAC TCA GAG GTT GAT CTA CAT TG |
| NO. 16 | |
| SEQ ID | GACGTGTGCTCTTCCGATCT NHNHN CTTGTA TAC TCA GAG GTT GAT CTA CAT TG |
| NO. 17 | |
| SEQ ID | ACACTCTTTCCCTACACGACGCTCTTCCGATCT NHNHN TCAAG AG CGA GGT GCT TCG TTA |
| NO. 18 | |
| SEQ ID | ACACTCTTTCCCTACACGACGCTCTTCCGATCT NHNHN AACAC AG CGA GGT GCT TCG TTA |
| NO. 19 | |
| SEQ ID | ACACTCTTTCCCTACACGACGCTCTTCCGATCT NHNHN ACATA AG CGA GGT GCT TCG TTA |
| NO. 20 | |
| SEQ ID | ACACTCTTTCCCTACACGACGCTCTTCCGATCT NHNHN TAAGA AG CGA GGT GCT TCG TTA |
| NO. 21 | |
| SEQ ID | ACACTCTTTCCCTACACGACGCTCTTCCGATCT NHNHN TCAAG AG CGA GGT GCT TCG TTA |
| NO. 22 | |
| SEQ ID | ACACTCTTTCCCTACACGACGCTCTTCCGATCT NHNHN AGTTT AG CGA GGT GCT TCG TTA |
| NO. 23 | |
| SEQ ID | ACACTCTTTCCCTACACGACGCTCTTCCGATCT NHNHN ATACA AG CGA GGT GCT TCG TTA |
| NO. 24 | |
| SEQ ID | ACACTCTTTCCCTACACGACGCTCTTCCGATCT NHNHN TTATG AG CGA GGT GCT TCG TTA |
| NO. 25 | |
| SEQ ID | AATGATACGGCGACCACCGAGATCTACACTCTTTCCCTACACGAC |
| NO. 26 | |
| SEQ ID | CAAGCAGAAGACGGCATACGAGATAA XXXXXX GTGACTGGAGTTCAGACGTGTGCTCTTCCGATCT (XXXXXX |
| NO. 27 | denotes cell barcodes) |
| SEQ ID | CGAGGTGCTTCGTTACAGGATGATGTTTTTGTCCATGATAGCCTTGTCGTCATCGTC |
| NO. 28 | |
| SEQ ID | CGAGGTGCTTCGTTACAGTTTAACTTTGATGTTCAGCAGAGCCTTGTCGTCATCGTC |
| NO. 29 | |
| SEQ ID | CGAGGTGCTTCGTTAAACGTGCAGAGATTTGTCCATCAGAGCCTTGTCGTCATCGTC |
| NO. 30 | |
| SEQ ID | CGAGGTGCTTCGTTACAGGTAGATGTGGTGGTCAGACAGAGCCTTGTCGTCATCGTC |
| NO. 31 | |
| SEQ ID | CGAGGTGCTTCGTTATGCTGCAGGATCAGGACCCCACAGTGCCTTGTCGTCATCGTC |
| NO. 32 | |
| SEQ ID | CGAGGTGCTTCGTTAAGCTGCTGCCGGATCAGGACCCCACAGTGCCTTGTCGTCATCGTC |
| NO. 33 | |
| SEQ ID | CGAGGTGCTTCGTTACAGCGGCAGCAGACGCATCCACAGAGCCTTGTCGTCATCGTC |
| NO. 34 | |
| SEQ ID | CGAGGTGCTTCGTTAAACTTCCATCGTGTGGGTGCCCAGCATAGCCTTGTCGTCATCGTC |
| NO. 35 | |
| SEQ ID | CGAGGTGCTTCGTTAAACGGTCCAGCAAACACCATTGATGCACTTGTCGTCATCGTC |
| NO. 36 | |
| SEQ ID | CGAGGTGCTTCGTTAAACCATCGTCAGCAGACCACCCAGGCACTTGTCGTCATCGTC |
| NO. 37 | |
| SEQ ID | CGAGGTGCTTCGTTATGCAGAGGTCTGGAAACTCCACAGCAGGCACTTGTCGTCATCGTC |
| NO. 38 | |
| SEQ ID | CGAGGTGCTTCGTTAAACAGCTTCCAGCAGCAGGTGCATACACTTGTCGTCATCGTC |
| NO. 39 | |
| SEQ ID | CGAGGTGCTTCGTTACAGGTAGAATGCGTGTTCCCACATATCCTTGTCGTCATCGTC |
| NO. 40 | |
| SEQ ID | CGAGGTGCTTCGTTAAACGGTCAGGATACCGATACCAGCCAGTTCCTTGTCGTCATCGTC |
| NO. 41 | |
| SEQ ID | CGAGGTGCTTCGTTAAACCTGGCAGATGTAAGAGTCAATGAACTTGTCGTCATCGTC |
| NO. 42 | |
| SEQ ID | CGAGGTGCTTCGTTACAGGTAGAAACCAACAGCGAACAGGAACTTGTCGTCATCGTC |
| NO. 43 | |
| SEQ ID | CGAGGTGCTTCGTTACAGAGCAACAGACAGAACGATCAGGAACTTGTCGTCATCGTC |
| NO. 44 | |
| SEQ ID | CGAGGTGCTTCGTTAAACAGACGGGAAGAAGTCAGACGGCAGGAACTTGTCGTCATCGTC |
| NO. 45 | |
| SEQ ID | CGAGGTGCTTCGTTAGATCAGCATGAAAACAGACCACAGGAACTTGTCGTCATCGTC |
| NO. 46 | |
| SEQ ID | CGAGGTGCTTCGTTACAGCAGCAGAGCCAGAGCGTACAGGAACTTGTCGTCATCGTC |
| NO. 47 | |
| SEQ ID | CGAGGTGCTTCGTTAGATTTCGTAGATGAATTTGTTCATAAACTTGTCGTCATCGTC |
| NO. 48 | |
| SEQ ID | CGAGGTGCTTCGTTAGATGAAGTGGAAGTCAGAGTACATGAACTTGTCGTCATCGTC |
| NO. 49 | |
| SEQ ID | CGAGGTGCTTCGTTAAACGTCGGTAAAGAATTCACCCACAAACTTGTCGTCATCGTC |
| NO. 50 | |
| SEQ ID | CGAGGTGCTTCGTTACAGGGTGAAAACAAAACCCAGAATGCCCTTGTCGTCATCGTC |
| NO. 51 | |
| SEQ ID | CGAGGTGCTTCGTTACAGCATAGCAACCAGCGTGCACAGGCCCTTGTCGTCATCGTC |
| NO. 52 | |
| SEQ ID | CGAGGTGCTTCGTTACAGAGACGGAGCGTGGTGCAGCAGACCCTTGTCGTCATCGTC |
| NO. 53 | |
| SEQ ID | CGAGGTGCTTCGTTACAGTTCTTCTTCCAGAGACAGCAGACCCTTGTCGTCATCGTC |
| NO. 54 | |
| SEQ ID | CGAGGTGCTTCGTTACAGGAAACGGTTCAGGTTCGGAGACAGACCCTTGTCGTCATCGTC |
| NO. 55 | |
| SEQ ID | CGAGGTGCTTCGTTACAGGTGTTCCATACCGTCGTACAGACCCTTGTCGTCATCGTC |
| NO. 56 | |
| SEQ ID | CGAGGTGCTTCGTTAAACCAGGTACAGAGCTTCAACCAGGTGCTTGTCGTCATCGTC |
| NO. 57 | |
| SEQ ID | CGAGGTGCTTCGTTAAACAGACAGAACACCGTCAACAGCCAGGATCTTGTCGTCATCGTC |
| NO. 58 | |
| SEQ ID | CGAGGTGCTTCGTTAAACACCGTGCACCGGCTCTTTCAGGATCTTGTCGTCATCGTC |
| NO. 59 | |
| SEQ ID | CGAGGTGCTTCGTTACAGTTTGTGGATGTGTTCCATCAGGATCTTGTCGTCATCGTC |
| NO. 60 | |
| SEQ ID | CGAGGTGCTTCGTTAAACGTATTGCAGATCTTGACCCGGCAGGATCTTGTCGTCATCGTC |
| NO. 61 | |
| SEQ ID | CGAGGTGCTTCGTTAAACGCCTTTGGTGATGTCGGTCAGGATCTTGTCGTCATCGTC |
| NO. 62 | |
| SEQ ID | CGAGGTGCTTCGTTAAACAGAGAACGGAACCTGGTCCATGATCTTGTCGTCATCGTC |
| NO. 63 | |
| SEQ ID | CGAGGTGCTTCGTTAAACACGTTCCAGGGCTTCCAGCATGATCTTGTCGTCATCGTC |
| NO. 64 | |
| SEQ ID | CGAGGTGCTTCGTTAAACAGAAAACGGAACTTGATCGGTGATCTTGTCGTCATCGTC |
| NO. 65 | |
| SEQ ID | CGAGGTGCTTCGTTAAACAGCGTTAATACCCAGAGCAACAATTTTCTTGTCGTCATCGTC |
| NO. 66 | |
| SEQ ID | CGAGGTGCTTCGTTACAGAACAATCAGGAACACTTGCAGTTTCTTGTCGTCATCGTC |
| NO. 67 | |
| SEQ ID | CGAGGTGCTTCGTTAAGCCAGCAGGTCACCTTCAGACAGTTTCTTGTCGTCATCGTC |
| NO. 68 | |
| SEQ ID | CGAGGTGCTTCGTTAAACAGCGTTGATACCCAGAGCAACCAGTTTCTTGTCGTCATCGTC |
| NO. 69 | |
| SEQ ID | CGAGGTGCTTCGTTACACATTGTTGATACCCAGTGCAACCAGTTTCTTGTCGTCATCGTC |
| NO. 70 | |
| SEQ ID | CGAGGTGCTTCGTTACACTTGCCAATACTGACCCCAGGTTTTCTTGTCGTCATCGTC |
| NO. 71 | |
| SEQ ID | CGAGGTGCTTCGTTACAGAGCGGTAACCTGACCAGCGCACAGCAGCTTGTCGTCATCGTC |
| NO. 72 | |
| SEQ ID | CGAGGTGCTTCGTTAAACTTCGATCAGAGCCAGACCGAACAGCAGCTTGTCGTCATCGTC |
| NO. 73 | |
| SEQ ID | CGAGGTGCTTCGTTACACATAAACCGGGTAACCAAACAGCAGCTTGTCGTCATCGTC |
| NO. 74 | |
| SEQ ID | CGAGGTGCTTCGTTAAACCCAGCCACCCAGGATGTTGAACAGCAGCTTGTCGTCATCGTC |
| NO. 75 | |
| SEQ ID | CGAGGTGCTTCGTTAAACAAACATGCAGGTTGCGCCCAGCAGCTTGTCGTCATCGTC |
| NO. 76 | |
| SEQ ID | CGAGGTGCTTCGTTACAGCAGGAAAGAGGTCAGGTCGATCAGCAGCTTGTCGTCATCGTC |
| NO. 77 | |
| SEQ ID | CGAGGTGCTTCGTTACAGCCACAGAGAGAACAGAGACAGCAGCTTGTCGTCATCGTC |
| NO. 78 | |
| SEQ ID | CGAGGTGCTTCGTTAAACAGCCATCGGACCGTTCCACAGCAGCTTGTCGTCATCGTC |
| NO. 79 | |
| SEQ ID | CGAGGTGCTTCGTTAAACATTGATAGACGGGATGTTCAGCATCTTGTCGTCATCGTC |
| NO. 80 | |
| SEQ ID | CGAGGTGCTTCGTTACAGCGGCAGCAGGTGCTGGTACAGCATCTTGTCGTCATCGTC |
| NO. 81 | |
| SEQ ID | CGAGGTGCTTCGTTAAACGGTGCAACCAGATTCCCAAACCATCTTGTCGTCATCGTC |
| NO. 82 | |
| SEQ ID | CGAGGTGCTTCGTTAAACGGTAGCCAGGTCGGTCTGAGCCAGGTTCTTGTCGTCATCGTC |
| NO. 83 | |
| SEQ ID | CGAGGTGCTTCGTTAAACGGTAGCAACCATCGGAACCAGGTTCTTGTCGTCATCGTC |
| NO. 84 | |
| SEQ ID | CGAGGTGCTTCGTTAAACAACATCCATGCACGGGATCAGCTGCTTGTCGTCATCGTC |
| NO. 85 | |
| SEQ ID | CGAGGTGCTTCGTTACAGAGAGGTCAGAGCGCACAGCAGACGCTTGTCGTCATCGTC |
| NO. 86 | |
| SEQ ID | CGAGGTGCTTCGTTACAGCAGAGCCAGCAGCGGCAGCAGACGCTTGTCGTCATCGTC |
| NO. 87 | |
| SEQ ID | CGAGGTGCTTCGTTACAGGTACGGTGCGTTCGGGAACATGCGCTTGTCGTCATCGTC |
| NO. 88 | |
| SEQ ID | CGAGGTGCTTCGTTAAACCATCGTGGTGCCATATTCCATCATACGCTTGTCGTCATCGTC |
| NO. 89 | |
| SEQ ID | CGAGGTGCTTCGTTAAACCAGGTACAGAGCTTCAACCAGATGTGACTTGTCGTCATCGTC |
| NO. 90 | |
| SEQ ID | CGAGGTGCTTCGTTAAACTTCCAGCAGACGGCCAATGATAGACTTGTCGTCATCGTC |
| NO. 91 | |
| SEQ ID | CGAGGTGCTTCGTTACAGCAGTTTAACACCAGCAGCCAGAGACTTGTCGTCATCGTC |
| NO. 92 | |
| SEQ ID | CGAGGTGCTTCGTTAAGCCTGGGTGATCCACATCAGCAGAGACTTGTCGTCATCGTC |
| NO. 93 | |
| SEQ ID | CGAGGTGCTTCGTTAAACCTGGGTGATCCACATCAGCAGAGACTTGTCGTCATCGTC |
| NO. 94 | |
| SEQ ID | CGAGGTGCTTCGTTAAGCGTAGTAAACGGTGATCGGCAGAGACTTGTCGTCATCGTC |
| NO. 95 | |
| SEQ ID | CGAGGTGCTTCGTTACAGTTCAGCCTGCAGCGGAGACAGAGACTTGTCGTCATCGTC |
| NO. 96 | |
| SEQ ID | CGAGGTGCTTCGTTAAACAGCGTTGATACCCAGAGCAACCAGAGACTTGTCGTCATCGTC |
| NO. 97 | |
| SEQ ID | CGAGGTGCTTCGTTACAGGTTAACTTCGTAAACGTGGTACAGAGACTTGTCGTCATCGTC |
| NO. 98 | |
| SEQ ID | CGAGGTGCTTCGTTACAGGGTAGCCACGGTGTTATACAGAGACTTGTCGTCATCGTC |
| NO. 99 | |
| SEQ ID | CGAGGTGCTTCGTTAAACGCCAACTTCAAAAACACGGTACATAGACTTGTCGTCATCGTC |
| NO. 100 | |
| SEQ ID | CGAGGTGCTTCGTTAAACACCCGTAATGGTACTAGCAACAGACTTGTCGTCATCGTC |
| NO. 101 | |
| SEQ ID | CGAGGTGCTTCGTTAAACAGGCATCGGAGACGGTTTTGACAGGGTCTTGTCGTCATCGTC |
| NO. 102 | |
| SEQ ID | CGAGGTGCTTCGTTAAACGGTCAGAACAATGTTAGCAGCAACCTTGTCGTCATCGTC |
| NO. 103 | |
| SEQ ID | CGAGGTGCTTCGTTAAACCAGCGGGGTCAGCATAACAATAACCTTGTCGTCATCGTC |
| NO. 104 | |
| SEQ ID | CGAGGTGCTTCGTTACAGCATAACAGAGGTTTCTTCCAGAACCTTGTCGTCATCGTC |
| NO. 105 | |
| SEQ ID | CGAGGTGCTTCGTTAGATAGCGAAACCCAGACCGAACAGAACCTTGTCGTCATCGTC |
| NO. 106 | |
| SEQ ID | CGAGGTGCTTCGTTATGCTTCCAGCAGGTCGTCGTGCAGAACCTTGTCGTCATCGTC |
| NO. 107 | |
| SEQ ID | CGAGGTGCTTCGTTATTCAACACCCGGAACACCACCCATCAGAACCTTGTCGTCATCGTC |
| NO. 108 | |
| SEQ ID | CGAGGTGCTTCGTTAAACAGCCAGAGAAGAAACAATAATCATAACCTTGTCGTCATCGTC |
| NO. 109 | |
| SEQ ID | CGAGGTGCTTCGTTAAACCACGTATTGCAGCAGGATGTTCATAACCTTGTCGTCATCGTC |
| NO. 110 | |
| SEQ ID | CGAGGTGCTTCGTTAGAGGTACACCAGAACACCAGTAACAACCTTGTCGTCATCGTC |
| NO. 111 | |
| SEQ ID | CGAGGTGCTTCGTTACAGGGTTGAAGTGCCCGGCAGTAACCACTTGTCGTCATCGTC |
| NO. 112 | |
| SEQ ID | CGAGGTGCTTCGTTAAACAGTAGAAGTACCCGGCAGTAACCACTTGTCGTCATCGTC |
| NO. 113 | |
| SEQ ID | CGAGGTGCTTCGTTAAACAAACGGAACCAGCAGAGACAGCCACTTGTCGTCATCGTC |
| NO. 114 | |
| SEQ ID | CGAGGTGCTTCGTTAAGCGGTAACCGGACCAGGTTCCAGGTACTTGTCGTCATCGTC |
| NO. 115 | |
| SEQ ID | CGAGGTGCTTCGTTAGATGTGCACGATAGCCGGTAACAGGTACTTGTCGTCATCGTC |
| NO. 116 | |
| SEQ ID | CGAGGTGCTTCGTTACAGACGCGGACCACGACGAGGCAGCAGGTACTTGTCGTCATCGTC |
| NO. 117 | |
| SEQ ID | CGAGGTGCTTCGTTACAGGGTCCACCAGTTCTGCTGCAGGTACTTGTCGTCATCGTC |
| NO. 118 | |
| SEQ ID | CGAGGTGCTTCGTTAAACAGCGTTGATACCCAGAGCAACCAGGTACTTGTCGTCATCGTC |
| NO. 119 | |
| SEQ ID | CGAGGTGCTTCGTTAAACAGCGTTAACACCCAGAGCAACCAGGTACTTGTCGTCATCGTC |
| NO. 120 | |
| SEQ ID | CGAGGTGCTTCGTTAAACCTGAGACATGGTGCCATCCATATACTTGTCGTCATCGTC |
| NO. 121 | |
| SEQ ID | CGAGGTGCTTCGTTAGGTGGTTTCCGGCTGCAGGTCCAGCATGTACTTGTCGTCATCGTC |
| NO. 122 | |
| SEQ ID | CGAGGTGCTTCGTTAAACAACAATCAGGTGGTCCAGAACATACTTGTCGTCATCGTC |
| NO. 123 | |
| SEQ ID | CGAGGTGCTTCGTTAAACAGAAACATCCAGGTAGATCAGGAACTTGTCGTCATCGTC |
| NO. 124 | |
| SEQ ID | CGAGGTGCTTCGTTACAGGTGCAGGTCAAAGTCCGGCATGAACTTGTCGTCATCGTC |
| NO. 125 | |
| SEQ ID | CGAGGTGCTTCGTTAAACACCGAACAGTTTAACACCCAGCAGAACCTTGTCGTCATCGTC |
| NO. 126 | |
| SEQ ID | CGAGGTGCTTCGTTACAGGTAGGTGTTGTGGTGGATCAGAGCCTTGTCGTCATCGTC |
| NO. 127 | |
| SEQ ID | CGAGGTGCTTCGTTAAACCAGGAAGATGGTGAAGTTTTCCAGAACCTTGTCGTCATCGTC |
| NO. 128 | |
| SEQ ID | CGAGGTGCTTCGTTACAGGAAGATGGTGAAGTTTTCCAGAACAGACTTGTCGTCATCGTC |
| NO. 129 | |
| SEQ ID | CGAGGTGCTTCGTTAAACTTCGTAGTTCAGGCCGGTCAGGATCTTGTCGTCATCGTC |
| NO. 130 | |
| SEQ ID | CGAGGTGCTTCGTTACAGAACCGGAACAAAACCGTACAGAGCCTTGTCGTCATCGTC |
| NO. 131 | |
| SEQ ID | CGAGGTGCTTCGTTAAACCGGCGGAGCCCAAGACATAACAACCTTGTCGTCATCGTC |
| NO. 132 | |
| SEQ ID | CGAGGTGCTTCGTTACAGCAGCAGAGACGGGGTTTCCAGCAGAGCCTTGTCGTCATCGTC |
| NO. 133 | |
| SEQ ID | CGAGGTGCTTCGTTAGATGTGCGGGATAACCGGAGACAGAGCCTTGTCGTCATCGTC |
| NO. 134 | |
| SEQ ID | CGAGGTGCTTCGTTAAACACCGTAAACCAGGAATTCAAACAGTTTCTTGTCGTCATCGTC |
| NO. 135 | |
| SEQ ID | CGAGGTGCTTCGTTAAACCGGAACAGAGCAGCAATTCAGGTTCTTGTCGTCATCGTC |
| NO. 136 | |
| SEQ ID | CGAGGTGCTTCGTTAGATCAGGTGGATGAACGGGATAATCAGCTTGTCGTCATCGTC |
| NO. 137 | |
| SEQ ID | CGAGGTGCTTCGTTACAGACACGGCGGCATACCAAACAGCAGCTTGTCGTCATCGTC |
| NO. 138 | |
| SEQ ID | CGAGGTGCTTCGTTACAGCAGAACCAGTTGATGAGACAGTTTCTTGTCGTCATCGTC |
| NO. 139 | |
| SEQ ID | CGAGGTGCTTCGTTAAACAGAGTAAACGTAAGAACCAACAGCCTTGTCGTCATCGTC |
| NO. 140 | |
| SEQ ID | CGAGGTGCTTCGTTAAACACGGGTCAGCAGGTTATACAGGAACTTGTCGTCATCGTC |
| NO. 141 | |
| SEQ ID | CGAGGTGCTTCGTTACAGTTTCTGCTGGATGTTCATCAGTTTCTTGTCGTCATCGTC |
| NO. 142 | |
| SEQ ID | CGAGGTGCTTCGTTACAGCGGAAACAGTTGTTCACCCAGCATCTTGTCGTCATCGTC |
| NO. 143 | |
| SEQ ID | CGAGGTGCTTCGTTAAACAGAAACGTCCAGGTAGGTCAGGAACTTGTCGTCATCGTC |
| NO. 144 | |
| SEQ ID | CGAGGTGCTTCGTTACAGGTGCAGGTCGAAGTCCGGCATAGACTTGTCGTCATCGTC |
| NO. 145 | |
| SEQ ID | CGAGGTGCTTCGTTACACACCAGACAGTTTCACACCCAGCAGAACCTTGTCGTCATCGTC |
| NO. 146 | |
| SEQ ID | CGAGGTGCTTCGTTACAGGTGGGTGTTGTGGTGGATCAGAGCCTTGTCGTCATCGTC |
| NO. 147 | |
| SEQ ID | CGAGGTGCTTCGTTAAACCAGCAGGATGGTGAAGTTTTCCAGAACCTTGTCGTCATCGTC |
| NO. 148 | |
| SEQ ID | CGAGGTGCTTCGTTACAGCAGGATGGTGAAGTTTTCCAGAACAGACTTGTCGTCATCGTC |
| NO. 149 | |
| SEQ ID | CGAGGTGCTTCGTTATGCTTCGTAGTTCAGACCAGTCAGGATCTTGTCGTCATCGTC |
| NO. 150 | |
| SEQ ID | CGAGGTGCTTCGTTACAGAACCGGAACAGAACCGTACAGAGCCTTGTCGTCATCGTC |
| NO. 151 | |
| SEQ ID | CGAGGTGCTTCGTTAAACCGGCGGAGCCCAAGACAGAACAACCTTGTCGTCATCGTC |
| NO. 152 | |
| SEQ ID | CGAGGTGCTTCGTTACAGCAGCAGAGACAGGGTTTCCAGCAGAGCCTTGTCGTCATCGTC |
| NO. 153 | |
| SEQ ID | CGAGGTGCTTCGTTAGATCAGCGGGATAACCGGAGACAGAGCCTTGTCGTCATCGTC |
| NO. 154 | |
| SEQ ID | CGAGGTGCTTCGTTACACACCGTGAACCAGGAACTCGAACAGTTTCTTGTCGTCATCGTC |
| NO. 155 | |
| SEQ ID | CGAGGTGCTTCGTTAAACCGGAACAGAGCAACGGTTCAGGTTCTTGTCGTCATCGTC |
| NO. 156 | |
| SEQ ID | CGAGGTGCTTCGTTAGATCAGGTGGATGCACGGGATAATCAGCTTGTCGTCATCGTC |
| NO. 157 | |
| SEQ ID | CGAGGTGCTTCGTTACAGGCACGGGGTCATACCGAACAGCAGCTTGTCGTCATCGTC |
| NO. 158 | |
| SEQ ID | CGAGGTGCTTCGTTACAGCAGAACCGGCTGGTGAGACAGTTTCTTGTCGTCATCGTC |
| NO. 159 | |
| SEQ ID | CGAGGTGCTTCGTTAAACAGAGTAAACGTGAGAACCAACAGCCTTGTCGTCATCGTC |
| NO. 160 | |
| SEQ ID | CGAGGTGCTTCGTTAAACACGGGTCAGCGGGTTATACAGGAACTTGTCGTCATCGTC |
| NO. 161 | |
| SEQ ID | CGAGGTGCTTCGTTACAGTTGCTGCTGGATGTTCATCAGTTTCTTGTCGTCATCGTC |
| NO. 162 | |
| SEQ ID | CGAGGTGCTTCGTTACAGCGGGAACAGACGTTCACCCAGCATCTTGTCGTCATCGTC |
| NO. 163 | |
| SEQ ID | CGAGGTGCTTCGTTACAGGAAGTGAACCAGTTCAGCAACTTTCTTGTCGTCATCGTC |
| NO. 164 | |
| SEQ ID | CGAGGTGCTTCGTTACAGGAAGTGAACCAGTTCAGCCATTTTCTTGTCGTCATCGTC |
| NO. 165 | |
| SEQ ID | CGAGGTGCTTCGTTACAGGAAGTGAACCAGTTCAACCATTTTCTTGTCGTCATCGTC |
| NO. 166 | |
| SEQ ID | CGAGGTGCTTCGTTACAGGAAGTGAACCAGTTTAGCAACTTTCTTGTCGTCATCGTC |
| NO. 167 | |
| SEQ ID | CGAGGTGCTTCGTTAGGTGAAACGCACAAATGCAAACAGGCGCTTGTCGTCATCGTC |
| NO. 168 | |
| SEQ ID | CGAGGTGCTTCGTTAGGTGTTACGGATCAGTTCATCCAGGTACTTGTCGTCATCGTC |
| NO. 169 | |
| SEQ ID | CGAGGTGCTTCGTTAAACTTCGTTACCACGGAATTGCAGGAACTTGTCGTCATCGTC |
| NO. 170 | |
| SEQ ID | CGAGGTGCTTCGTTAAACTTTTTCTTCAATATCGGTCAGGATCTTGTCGTCATCGTC |
| NO. 171 | |
| SEQ ID | CGAGGTGCTTCGTTACAGGTGCAGGTCAAAATCCGGCATGAACTTGTCGTCATCGTC |
| NO. 172 | |
| SEQ ID | CGAGGTGCTTCGTTACAGCTTCTGTTGGATGTTCATCAGTTTCTTGTCGTCATCGTC |
| NO. 173 | |
| SEQ ID | CGAGGTGCTTCGTTAAACAGGTTTGTCAACCGGAAACATACCCTTGTCGTCATCGTC |
| NO. 174 | |
| SEQ ID | CGAGGTGCTTCGTTAAACCGGAAACATACCCAGATACTGAACCTTGTCGTCATCGTC |
| NO. 175 | |
| SEQ ID | CGAGGTGCTTCGTTACAGTTCATATTCCACATGCGGTAACCACTTGTCGTCATCGTC |
| NO. 176 | |
| SEQ ID | CGAGGTGCTTCGTTAAACGTGCAACGGAGATGCCCACAGTTTCTTGTCGTCATCGTC |
| NO. 177 | |
| SEQ ID | CGAGGTGCTTCGTTACAGGGTGAAGATGTCCACATTCAGGATCTTGTCGTCATCGTC |
| NO. 178 | |
| SEQ ID | CGAGGTGCTTCGTTACAGGTGGGTAATGAAAACGTAAACAAACTTGTCGTCATCGTC |
| NO. 179 | |
| SEQ ID | CGAGGTGCTTCGTTAAATACGTGCCTGGGTCAGCAGCATGAACTTGTCGTCATCGTC |
| NO. 180 | |
| SEQ ID | CGAGGTGCTTCGTTACACACGTACTAAGGCCAGAATTGACAGCATCTTGTCGTCATCGTC |
| NO. 181 | |
| SEQ ID | CGAGGTGCTTCGTTAAACTTCTGCCGGGGTGTAAGACAGAGCCTTGTCGTCATCGTC |
| NO. 182 | |
| SEQ ID | CGAGGTGCTTCGTTAGATCAGACCCAGGTCACCGTCCATCAGATGCTTGTCGTCATCGTC |
| NO. 183 | |
| SEQ ID | CGAGGTGCTTCGTTACAGACCCAGGTCACCGTCCATCAGATGCTTGTCGTCATCGTC |
| NO. 184 | |
| SEQ ID | CGAGGTGCTTCGTTACAGAGACGGAGAATGCGGAACCATCAGCTTGTCGTCATCGTC |
| NO. 185 | |
| SEQ ID | CGAGGTGCTTCGTTATGCGTTCAGAATTTGCTCAAACAGTTTCTTGTCGTCATCGTC |
| NO. 186 | |
| SEQ ID | CGAGGTGCTTCGTTACAGTTTGGTGTGCAGGGTCAGCATGTACTTGTCGTCATCGTC |
| NO. 187 | |
| SEQ ID | CGAGGTGCTTCGTTAAATCGCAATGAAAAAAGAGGTCAGACCCTTGTCGTCATCGTC |
| NO. 188 | |
| SEQ ID | CGAGGTGCTTCGTTAAACCAGGTACAGGTGGTCAGACAGAAACTTGTCGTCATCGTC |
| NO. 189 | |
| SEQ ID | CGAGGTGCTTCGTTACAGACCAGAGAAGATAGCCAGCAGGTACTTGTCGTCATCGTC |
| NO. 190 | |
| SEQ ID | CGAGGTGCTTCGTTAAACAACTGCGGTGATGGTGTTCAGTTTCTTGTCGTCATCGTC |
| NO. 191 | |
| SEQ ID | CGAGGTGCTTCGTTACAGACCGTGAGCGTCGTCCACCAGCATCTTGTCGTCATCGTC |
| NO. 192 | |
| SEQ ID | CGAGGTGCTTCGTTATGCAACAATAACAGCCAGCATCAGCATCTTGTCGTCATCGTC |
| NO. 193 | |
| SEQ ID | CGAGGTGCTTCGTTACACAACCGCCAGCGTACCTGCTAACAGCTTGTCGTCATCGTC |
| NO. 194 | |
| SEQ ID | CGAGGTGCTTCGTTAAACACGAGGAGACAGCGGAGCCAGAGACTTGTCGTCATCGTC |
| NO. 195 | |
| SEQ ID | CGAGGTGCTTCGTTAAACGCCGAACAGTTTCACACCCAGCAGAACCTTGTCGTCATCGTC |
| NO. 196 | |
| SEQ ID | CGAGGTGCTTCGTTAAACCGTACCAACCATCGTAAACAGCGTCTTGTCGTCATCGTC |
| NO. 197 | |
| SEQ ID | CGAGGTGCTTCGTTAAACATTCGGCACGGTCATAGCCAGCAGCTTGTCGTCATCGTC |
| NO. 198 | |
| SEQ ID | CGAGGTGCTTCGTTACACATTCGGAACTTTAATTGCCAGTAACTTGTCGTCATCGTC |
| NO. 199 | |
| SEQ ID | CGAGGTGCTTCGTTAAACTTCCAGGTCGTTGATTTTGGTCATAAACTTGTCGTCATCGTC |
| NO. 200 | |
| SEQ ID | CGAGGTGCTTCGTTACAGAACAGACAGCAGATCGTTCAGGAACTTGTCGTCATCGTC |
| NO. 201 | |
| SEQ ID | CGAGGTGCTTCGTTAAATGAACCATGCAATAACCATCAGACCCTTGTCGTCATCGTC |
| NO. 202 | |
| SEQ ID | CGAGGTGCTTCGTTAAACAGCAACAACATAAGAAAAGATGAACTTGTCGTCATCGTC |
| NO. 203 | |
| SEQ ID | CGAGGTGCTTCGTTACAGATAGGTGTTGTGGTGGATCAGAGCCTTGTCGTCATCGTC |
| NO. 204 | |
| SEQ ID | CGAGGTGCTTCGTTAGATATTAGCAGCCCAGTCCAGCAGAATCTTGTCGTCATCGTC |
| NO. 205 | |
| SEQ ID | CGAGGTGCTTCGTTAAACCGGAGACAGTTCAGAGAACAGACTCTTGTCGTCATCGTC |
| NO. 206 | |
| SEQ ID | CGAGGTGCTTCGTTACAGTTCGGTGTAGTATTCCAGAACAGACTTGTCGTCATCGTC |
| NO. 207 | |
| SEQ ID | CGAGGTGCTTCGTTAAACTTCAAACAGAGATTTCGCAATATGCTTGTCGTCATCGTC |
| NO. 208 | |
| SEQ ID | CGAGGTGCTTCGTTAAACCGGCGGAGCCCAACTCATAACAACCTTGTCGTCATCGTC |
| NO. 209 | |
| SEQ ID | CGAGGTGCTTCGTTAAACGGTCACAAAAATATCCATTGCGGTCTTGTCGTCATCGTC |
| NO. 210 | |
| SEQ ID | CGAGGTGCTTCGTTAAACAAAAATGTCCATAGCGGTAACATACTTGTCGTCATCGTC |
| NO. 211 | |
| SEQ ID | CGAGGTGCTTCGTTATGCGCCAACAATCCAGGTCAGAACGTACTTGTCGTCATCGTC |
| NO. 212 | |
| SEQ ID | CGAGGTGCTTCGTTACAGAACCGGAACAAAACCATACAGTGCCTTGTCGTCATCGTC |
| NO. 213 | |
| SEQ ID | CGAGGTGCTTCGTTACAGTAACAGAGACGGGGTTTCCAGCAGTGCCTTGTCGTCATCGTC |
| NO. 214 | |
| SEQ ID | CGAGGTGCTTCGTTACAGCAGAGACGGGGTTTCCAGCAGTGCCTTGTCGTCATCGTC |
| NO. 215 | |
| SEQ ID | CGAGGTGCTTCGTTAGATCCAGTACAGCATATTGAAGATCAGCTTGTCGTCATCGTC |
| NO. 216 | |
| SEQ ID | CGAGGTGCTTCGTTAAACCGGAGAGGTGGTCAGGTCCAGAGACTTGTCGTCATCGTC |
| NO. 217 | |
| SEQ ID | CGAGGTGCTTCGTTACAGGTAGATGTTAGCCAGCGGCATTTTCTTGTCGTCATCGTC |
| NO. 218 | |
| SEQ ID | CGAGGTGCTTCGTTAAACCAGGAAGTCCAGAGAGAAAGAGAACTTGTCGTCATCGTC |
| NO. 219 | |
| SEQ ID | CGAGGTGCTTCGTTACAGCTTCACGGTGTACTTTTGCAGAAACTTGTCGTCATCGTC |
| NO. 220 | |
| SEQ ID | CGAGGTGCTTCGTTAGATTTTTGCGATCATAGCGTTCAGGATCTTGTCGTCATCGTC |
| NO. 221 | |
| SEQ ID | CGAGGTGCTTCGTTAGATGTAGGTGTGCAGTTCAGACAGTTTCTTGTCGTCATCGTC |
| NO. 222 | |
| SEQ ID | CGAGGTGCTTCGTTAAACGCTAACAGACAGTAACAGCAGAGACTTGTCGTCATCGTC |
| NO. 223 | |
| SEQ ID | CGAGGTGCTTCGTTACAGGGTCACGGTCAGTTCGGCCATATACTTGTCGTCATCGTC |
| NO. 224 | |
| SEQ ID | CGAGGTGCTTCGTTACAGTTCACCCGGAGAGTCATACATATACTTGTCGTCATCGTC |
| NO. 225 | |
| SEQ ID | CGAGGTGCTTCGTTAAACAATGTAAACAATAGAGAACGGCATCATCTTGTCGTCATCGTC |
| NO. 226 | |
| SEQ ID | CGAGGTGCTTCGTTAAATGTAAACAATAGAGAACGGCATCATCTTGTCGTCATCGTC |
| NO. 227 | |
| SEQ ID | CGAGGTGCTTCGTTAGATGTAAACAATAGAGAACGGCATCATCAGCTTGTCGTCATCGTC |
| NO. 228 | |
| SEQ ID | CGAGGTGCTTCGTTACAGGTAGAACAGGTGAGAGAAACTCATGGTCTTGTCGTCATCGTC |
| NO. 229 | |
| SEQ ID | CGAGGTGCTTCGTTACAGCAGGATAGAAATGCCCATAATGAACTTGTCGTCATCGTC |
| NO. 230 | |
| SEQ ID | CGAGGTGCTTCGTTAAACCAGGAATGCACGGTGAAACAGAACCTTGTCGTCATCGTC |
| NO. 231 | |
| SEQ ID | CGAGGTGCTTCGTTAAACCAGGTTCAGAACATCAGAAGAAAACTTGTCGTCATCGTC |
| NO. 232 | |
| SEQ ID | CGAGGTGCTTCGTTACAGAAACTCCAGATACGGAACCAGACGCTTGTCGTCATCGTC |
| NO. 233 | |
| SEQ ID | CGAGGTGCTTCGTTAAACCGGCTTGATCTCACGAGACAGTTTCTTGTCGTCATCGTC |
| NO. 234 | |
| SEQ ID | CGAGGTGCTTCGTTAAACATAGTAGGTTAAGATTGCCAGCAGCTTGTCGTCATCGTC |
| NO. 235 | |
| SEQ ID | CGAGGTGCTTCGTTAAGCGTTCACGTTCAGATCCGGCAGAAACTTGTCGTCATCGTC |
| NO. 236 | |
| SEQ ID | CGAGGTGCTTCGTTAGATCGGAGACAGGATTTCAGAGGTGTACTTGTCGTCATCGTC |
| NO. 237 | |
| SEQ ID | CGAGGTGCTTCGTTACAGAGCCAGATAGCGATTAAACAGGTTCTTGTCGTCATCGTC |
| NO. 238 | |
| SEQ ID | CGAGGTGCTTCGTTACAGCAGCCAGGTAACTGATGCGATCAGCAGCTTGTCGTCATCGTC |
| NO. 239 | |
| SEQ ID | CGAGGTGCTTCGTTACAGCCAGGTAACAGATGCGATCAGCAGCTTGTCGTCATCGTC |
| NO. 240 | |
| SEQ ID | CGAGGTGCTTCGTTAAACGCCTTCCATAAATTCGTCCAGGAACTTGTCGTCATCGTC |
| NO. 241 | |
| SEQ ID | CGAGGTGCTTCGTTAGATATGCGGGATAACCGGAGACAGAGCCTTGTCGTCATCGTC |
| NO. 242 | |
| SEQ ID | CGAGGTGCTTCGTTAAGCCAGTTGAACCGGAGGCCATAAATACTTGTCGTCATCGTC |
| NO. 243 | |
| SEQ ID | CGAGGTGCTTCGTTAAACAACACGTAACGGCTCCCATAACCACTTGTCGTCATCGTC |
| NO. 244 | |
| SEQ ID | CGAGGTGCTTCGTTACAGCAGACACGGCGGCATACCAAACAGCAGCTTGTCGTCATCGTC |
| NO. 245 | |
| SEQ ID | CGAGGTGCTTCGTTACAGACACGGCGGCATACCGAACAGCAGCTTGTCGTCATCGTC |
| NO. 246 | |
| SEQ ID | CGAGGTGCTTCGTTACAGTTTCGCAATGGTTTCATTCAGACCCTTGTCGTCATCGTC |
| NO. 247 | |
| SEQ ID | CGAGGTGCTTCGTTAAACAGGCGGCGGCATACCAATAACCAGCTTGTCGTCATCGTC |
| NO. 248 | |
| SEQ ID | CGAGGTGCTTCGTTAAACTTCCGGGCCTTTTTCGTCCAGCAGCTTGTCGTCATCGTC |
| NO. 249 | |
| SEQ ID | CGAGGTGCTTCGTTAGATAGAAGAGTAATACTGATAAATGAACTTGTCGTCATCGTC |
| NO. 250 | |
| SEQ ID | CGAGGTGCTTCGTTAAACTTCGTAGTTCAGACCCGTCAGAATCTTGTCGTCATCGTC |
| NO. 251 | |
| SEQ ID | CGAGGTGCTTCGTTACAGGGTCGGGTCAGCAGGATTCAGAATCTTGTCGTCATCGTC |
| NO. 252 | |
| SEQ ID | CGAGGTGCTTCGTTACAGGAAAGGGAACATAACAATCAGGATCTTGTCGTCATCGTC |
| NO. 253 | |
| SEQ ID | CGAGGTGCTTCGTTACATCAGGGTCAGCAGGTACAGCATGAACTTGTCGTCATCGTC |
| NO. 254 | |
| SEQ ID | CGAGGTGCTTCGTTAAACCATAACCAGGTACATGAACAGGAACTTGTCGTCATCGTC |
| NO. 255 | |
| SEQ ID | CGAGGTGCTTCGTTACAGCAGCGGGAACAGAACATTCAGGAACTTGTCGTCATCGTC |
| NO. 256 | |
| SEQ ID | CGAGGTGCTTCGTTACAGTGCCAGGTTTTCCAGAAAGATATACTTGTCGTCATCGTC |
| NO. 257 | |
| SEQ ID | CGAGGTGCTTCGTTAGGTATTATAGAACACAGCAACCATTTTCTTGTCGTCATCGTC |
| NO. 258 | |
| SEQ ID | CGAGGTGCTTCGTTACAGCATGTAGATAAACGGATTCAGAACCTTGTCGTCATCGTC |
| NO. 259 | |
| SEQ ID | CGAGGTGCTTCGTTAAACAAACACAACCAGTTCGTTCAGATACTTGTCGTCATCGTC |
| NO. 260 | |
| SEQ ID | CGAGGTGCTTCGTTAAACAACGGTCACGGTGTAGATTTCCAGGAACTTGTCGTCATCGTC |
| NO. 261 | |
| SEQ ID | CGAGGTGCTTCGTTAAACGGTCACGGTATAGATTTCCAGGAACTTGTCGTCATCGTC |
| NO. 262 | |
| SEQ ID | CGAGGTGCTTCGTTAGATGAATGCGAAAAAGGTGAACAGGAACTTGTCGTCATCGTC |
| NO. 263 | |
| SEQ ID | CGAGGTGCTTCGTTAGATAGCCAGCAGATAGCAGTCAATGAACTTGTCGTCATCGTC |
| NO. 264 | |
| SEQ ID | CGAGGTGCTTCGTTAAACGTGCGGAGAACCTTGCAGCAGAGACTTGTCGTCATCGTC |
| NO. 265 | |
| SEQ ID | CGAGGTGCTTCGTTACAGCGGGAACAGTTGTTCACCCAGCATCTTGTCGTCATCGTC |
| NO. 266 | |
| SEQ ID | CGAGGTGCTTCGTTAAACAAACAGCAGAACCAGGAACAGGAACTTGTCGTCATCGTC |
| NO. 267 | |
| SEQ ID | CGAGGTGCTTCGTTAAACGCCCATAACCAGCGGAAAAACCAGCTTGTCGTCATCGTC |
| NO. 268 | |
| SEQ ID | CGAGGTGCTTCGTTACAGCGGAAAAACCAGATCATGCAGACGCTTGTCGTCATCGTC |
| NO. 269 | |
| SEQ ID | CGAGGTGCTTCGTTAAACAGAGTAAACATAAGAACCAACAGCCTTGTCGTCATCGTC |
| NO. 270 | |
| SEQ ID | CGAGGTGCTTCGTTATGCCGGAAAGAAGATAATGCTCAGCAGCTTGTCGTCATCGTC |
| NO. 271 | |
| SEQ ID | CGAGGTGCTTCGTTACATGAAATGAGAGAAAACGGTCAGGAACTTGTCGTCATCGTC |
| NO. 272 | |
| SEQ ID | CGAGGTGCTTCGTTATGCAGATGAGAATGCAGCGAACAGTAACTTGTCGTCATCGTC |
| NO. 273 | |
| SEQ ID | CGAGGTGCTTCGTTACAGACCCCACAGAGAAACCAGTAATTGCTTGTCGTCATCGTC |
| NO. 274 | |
| SEQ ID | CGAGGTGCTTCGTTAAACTTCCACAACCACACCCAGTTGATGCTTGTCGTCATCGTC |
| NO. 275 | |
| SEQ ID | CGAGGTGCTTCGTTAAACACGTTGAACGGCATCCAGAATAAACTTGTCGTCATCGTC |
| NO. 276 | |
| SEQ ID | CGAGGTGCTTCGTTACAGAGAGTTATGATATTCAGACAGTTTCTTGTCGTCATCGTC |
| NO. 277 | |
| SEQ ID | CGAGGTGCTTCGTTAAATGAATTTGAAGTTCTGGTCTGCTAACAGCTTGTCGTCATCGTC |
| NO. 278 | |
| SEQ ID | CGAGGTGCTTCGTTACAGGTACGGTTTGAAATAATTCAGAACCTTGTCGTCATCGTC |
| NO. 279 | |
| SEQ ID | CGAGGTGCTTCGTTAAATAGAAGAAATTGCGCCAACCAGAGCCTTGTCGTCATCGTC |
| NO. 280 | |
| SEQ ID | CGAGGTGCTTCGTTAAACACGGGTCAGCAGGTTATACAGAAACTTGTCGTCATCGTC |
| NO. 281 | |
| SEQ ID | CGAGGTGCTTCGTTAAACCGGGGTACTGATTTCAACAATGTGCTTGTCGTCATCGTC |
| NO. 282 | |
| SEQ ID | CGAGGTGCTTCGTTAAACAATTTCAACACCAGCCAGCAGTTTCTTGTCGTCATCGTC |
| NO. 283 | |
| SEQ ID | CGAGGTGCTTCGTTAAACGGTGTGGACAACCTGTTCGCCCAGAATCTTGTCGTCATCGTC |
| NO. 284 | |
| SEQ ID | CGAGGTGCTTCGTTACAGAAAAACCAGTGAACCCGCCATTGCCTTGTCGTCATCGTC |
| NO. 285 | |
| SEQ ID | CGAGGTGCTTCGTTAAGCTGCAATGATGGTGGTCGGCATGTACTTGTCGTCATCGTC |
| NO. 286 | |
| SEQ ID | CGAGGTGCTTCGTTACATACCAAAAATCTGTGCAACCAGGATCTTGTCGTCATCGTC |
| NO. 287 | |
| SEQ ID | CGAGGTGCTTCGTTACAGACCCAGAACTTGCGTAATCAGAATCTTGTCGTCATCGTC |
| NO. 288 | |
| SEQ ID | CGAGGTGCTTCGTTACAGACCCAGGAACAGAGCAGCCAGGATACGCTTGTCGTCATCGTC |
| NO. 289 | |
| SEQ ID | CGAGGTGCTTCGTTACAGCAGAACCGTCCAAGAACCCAGCAGCTTGTCGTCATCGTC |
| NO. 290 | |
| SEQ ID | CGAGGTGCTTCGTTAAACGCCGTAAACCAGGAACTCAAACAGTTTCTTGTCGTCATCGTC |
| NO. 291 | |
| SEQ ID | CGAGGTGCTTCGTTAGGTGTACGGCAGCGGGTTAGCCAGTTTCTTGTCGTCATCGTC |
| NO. 292 | |
| SEQ ID | CGAGGTGCTTCGTTACAGCAGAACCAGTTGGTGAGACAGTTTCTTGTCGTCATCGTC |
| NO. 293 | |
| SEQ ID | CGAGGTGCTTCGTTACAGACCGATTGCTTCGTCCAGCAGGAACTTGTCGTCATCGTC |
| NO. 294 | |
| SEQ ID | CGAGGTGCTTCGTTAGGTGGTAGCCATAGAATCTTGCAGATACTTGTCGTCATCGTC |
| NO. 295 | |
| SEQ ID | CGAGGTGCTTCGTTACAGGAAAGAAGAGATAGATGCCATCAGGAACTTGTCGTCATCGTC |
| NO. 296 | |
| SEQ ID | CGAGGTGCTTCGTTAGAAAGAAGAGATAGATGCCATCAGGAACTTGTCGTCATCGTC |
| NO. 297 | |
| SEQ ID | CGAGGTGCTTCGTTACAGAAAACTTGAAATAGATGCCATCAGCTTGTCGTCATCGTC |
| NO. 298 | |
| SEQ ID | CGAGGTGCTTCGTTATGCCGAGAAATGCAGAGCGAACAGCAGCTTGTCGTCATCGTC |
| NO. 299 | |
| SEQ ID | CGAGGTGCTTCGTTAAATACCCGGATAATGCTTAATCAGACGCTTGTCGTCATCGTC |
| NO. 300 | |
| SEQ ID | CGAGGTGCTTCGTTACAGAACACCAGAATAGCTGCTCATAAACTTGTCGTCATCGTC |
| NO. 301 | |
| SEQ ID | CGAGGTGCTTCGTTAAACCATTGCCAGCAGCGGACCCATACCCTTGTCGTCATCGTC |
| NO. 302 | |
| SEQ ID | CGAGGTGCTTCGTTACAGAAAGATGGTGAAGTTTTCCAGAACAGACTTGTCGTCATCGTC |
| NO. 303 | |
| SEQ ID | CGAGGTGCTTCGTTAAACCAGAAAGATGGTGAAGTTTTCCAGAACCTTGTCGTCATCGTC |
| NO. 304 | |
| SEQ ID | CGAGGTGCTTCGTTACATATTGGTTTCCAGGGTCATCAGAAACTTGTCGTCATCGTC |
| NO. 305 | |
| SEQ ID | CGAGGTGCTTCGTTAAACAACATAGAAAGAAACTGCAAACGTAACCTTGTCGTCATCGTC |
| NO. 306 | |
| SEQ ID | CGAGGTGCTTCGTTACAGCAGTAAGGTAACTTGCAGTAATGCCTTGTCGTCATCGTC |
| NO. 307 | |
| SEQ ID | CGAGGTGCTTCGTTAAACAGATGCAGCGTGTTCAGAGGTGTACTTGTCGTCATCGTC |
| NO. 308 | |
| SEQ ID | CGAGGTGCTTCGTTAGGTTTCCAGGAAGGTTTCAGCCAGAGACTTGTCGTCATCGTC |
| NO. 309 | |
| SEQ ID | CGAGGTGCTTCGTTAAACGGTGTTAGAGATAGCTGCCATCGTCTTGTCGTCATCGTC |
| NO. 310 | |
| SEQ ID | CGAGGTGCTTCGTTACAGCGGAACAGACGGAGATGCCAGAAACTTGTCGTCATCGTC |
| NO. 311 | |
| SEQ ID | CGAGGTGCTTCGTTAAACAGACGGAGATGCCAGGAACATATACTTGTCGTCATCGTC |
| NO. 312 | |
| SEQ ID | CGAGGTGCTTCGTTACAGAGACACATCATGTTTCAGCAGCATCTTGTCGTCATCGTC |
| NO. 313 | |
| SEQ ID | CGAGGTGCTTCGTTACAGAACAATTAACATATTCAGCAGTAACTTGTCGTCATCGTC |
| NO. 314 | |
| SEQ ID | CGAGGTGCTTCGTTACAGAGCAGAGGTATAACCGATCATAAACTTGTCGTCATCGTC |
| NO. 315 | |
| SEQ ID | CGAGGTGCTTCGTTAGGTGTAACCAATCATAAACAGCAGGTACTTGTCGTCATCGTC |
| NO. 316 | |
| SEQ ID | CGAGGTGCTTCGTTAAACCGGATCAATGTCCAGCGGCAGTTTCTTGTCGTCATCGTC |
| NO. 317 | |
| SEQ ID | CGAGGTGCTTCGTTAGATTTCAAAACTCTGGTTCAGTTGGAACTTGTCGTCATCGTC |
| NO. 318 | |
| SEQ ID | CGAGGTGCTTCGTTAGATCAGGTGAATAAACGGGATAATCAGCTTGTCGTCATCGTC |
| NO. 319 | |
| SEQ ID | CGAGGTGCTTCGTTAAATTGAGCTACTTGCCCAGAACATTAACTTGTCGTCATCGTC |
| NO. 320 | |
| SEQ ID | CGAGGTGCTTCGTTAGATCAGGTACAGGTGTGAGATAATCATCTTGTCGTCATCGTC |
| NO. 321 | |
| SEQ ID | CGAGGTGCTTCGTTAAACAGAAACATCCAGGTAAATCAGGAACTTGTCGTCATCGTC |
| NO. 322 | |
| SEQ ID | CGAGGTGCTTCGTTAAACAGAAACATTGAAAATCAGCAGTAACTTGTCGTCATCGTC |
| NO. 323 | |
| SEQ ID | CGAGGTGCTTCGTTAAACAAACAGATTCATCCACAGCAGGCTCTTGTCGTCATCGTC |
| NO. 324 | |
| SEQ ID | CGAGGTGCTTCGTTACACATGATACCATTTTTCCTGGGTGAACTTGTCGTCATCGTC |
| NO. 325 | |
| SEQ ID | CGAGGTGCTTCGTTAAACAGAAATGTCCTGAATAAACAGATTCTTGTCGTCATCGTC |
| NO. 326 | |
| SEQ ID | CGAGGTGCTTCGTTAGGTGTTTTTAATCAGTTCGTCCAGGTACTTGTCGTCATCGTC |
| NO. 327 | |
| SEQ ID | CGAGGTGCTTCGTTAAACTTCGTTACCACGAGATTGCAGGAACTTGTCGTCATCGTC |
| NO. 328 | |
| SEQ ID | CGAGGTGCTTCGTTAAACTTTTTCTTCCATGTCGGTCAGGATCTTGTCGTCATCGTC |
| NO. 329 | |
| SEQ ID | CGAGGTGCTTCGTTACAGGTGCAGGTCGAAGTCCGGCATAGACTTGTCGTCATCGTC |
| NO. 330 | |
| SEQ ID | CGAGGTGCTTCGTTACAGTTGCTGCTGGATGTTCATCAGTTTCTTGTCGTCATCGTC |
| NO. 331 | |
| SEQ ID | CGAGGTGCTTCGTTAAACAGGTTTGTCAACCGGCAGCATACCCTTGTCGTCATCGTC |
| NO. 332 | |
| SEQ ID | CGAGGTGCTTCGTTAAACCGGCAGCATACCCAGATACTGAACCTTGTCGTCATCGTC |
| NO. 333 | |
| SEQ ID | CGAGGTGCTTCGTTACAGTTCATATTCCACGTGCGGTAAACGCTTGTCGTCATCGTC |
| NO. 334 | |
| SEQ ID | CGAGGTGCTTCGTTAAACGTGTAACGGAGATGCGCCCAGTTTCTTGTCGTCATCGTC |
| NO. 335 | |
| SEQ ID | CGAGGTGCTTCGTTACAGGGTGAAAACGTCCACATTCAGGATCTTGTCGTCATCGTC |
| NO. 336 | |
| SEQ ID | CGAGGTGCTTCGTTACAGGTGGGTGGTGAAAACGTAAACAAACTTGTCGTCATCGTC |
| NO. 337 | |
| SEQ ID | CGAGGTGCTTCGTTACAGACGTGCCTGGGTCAGCAGCATGAACTTGTCGTCATCGTC |
| NO. 338 | |
| SEQ ID | CGAGGTGCTTCGTTACACACCAACCAGAGCCAGGATAGACAGCATCTTGTCGTCATCGTC |
| NO. 339 | |
| SEQ ID | CGAGGTGCTTCGTTAAACTTCAACCGGGGTGTAAGACAGAGCCTTGTCGTCATCGTC |
| NO. 340 | |
| SEQ ID | CGAGGTGCTTCGTTAGATCAGACCCAGGTCACCGTCCATCAGGTTCTTGTCGTCATCGTC |
| NO. 341 | |
| SEQ ID | CGAGGTGCTTCGTTACAGACCCAGGTCACCGTCCATCAGGTTCTTGTCGTCATCGTC |
| NO. 342 | |
| SEQ ID | CGAGGTGCTTCGTTACAGAGACGGAGAGTGCAGAACCATCAGCTTGTCGTCATCGTC |
| NO. 343 | |
| SEQ ID | CGAGGTGCTTCGTTATGCTTTCAGGATCTGCTCAAACAGTTTCTTGTCGTCATCGTC |
| NO. 344 | |
| SEQ ID | CGAGGTGCTTCGTTACAGTTTGGTACGCAGGGTCAGCATGTACTTGTCGTCATCGTC |
| NO. 345 | |
| SEQ ID | CGAGGTGCTTCGTTAGATAGCGATAACAAAAGAGGTCAGACCCTTGTCGTCATCGTC |
| NO. 346 | |
| SEQ ID | CGAGGTGCTTCGTTAAACCAGGTACGGGTGGTCAGACAGGAACTTGTCGTCATCGTC |
| NO. 347 | |
| SEQ ID | CGAGGTGCTTCGTTACAGACCAGAGAAGATAGCGAACAGGTACTTGTCGTCATCGTC |
| NO. 348 | |
| SEQ ID | CGAGGTGCTTCGTTAAACAACCGGGGTGATGGTGTTCAGTTTCTTGTCGTCATCGTC |
| NO. 349 | |
| SEQ ID | CGAGGTGCTTCGTTACAGACCGTGAGCGTCGTCCACCAGAACCTTGTCGTCATCGTC |
| NO. 350 | |
| SEQ ID | CGAGGTGCTTCGTTATGCAACAATAACAGCGAACATCAGCATCTTGTCGTCATCGTC |
| NO. 351 | |
| SEQ ID | CGAGGTGCTTCGTTACACTCCCGCCAGCGTACCTGCTAACAGCTTGTCGTCATCGTC |
| NO. 352 | |
| SEQ ID | CGAGGTGCTTCGTTATGCACGAGGAGACAGCGGAGCCAGAGACTTGTCGTCATCGTC |
| NO. 353 | |
| SEQ ID | CGAGGTGCTTCGTTAAACGCCAGACAGTTTCACACCCAGCAGAACCTTGTCGTCATCGTC |
| NO. 354 | |
| SEQ ID | CGAGGTGCTTCGTTAAACGGTGCCCACAATGGTAAACAGGGTCTTGTCGTCATCGTC |
| NO. 355 | |
| SEQ ID | CGAGGTGCTTCGTTAAACATTCGGAACTTTCATAGCCAGCAGCTTGTCGTCATCGTC |
| NO. 356 | |
| SEQ ID | CGAGGTGCTTCGTTAAACTTCCAGACCGTTGATTTTGGTCATAAACTTGTCGTCATCGTC |
| NO. 357 | |
| SEQ ID | CGAGGTGCTTCGTTACATAACAGACAGCAGGTCGTTCAGGAACTTGTCGTCATCGTC |
| NO. 358 | |
| SEQ ID | CGAGGTGCTTCGTTAAATGAACCATGCGATAGCCATCAGACCCTTGTCGTCATCGTC |
| NO. 359 | |
| SEQ ID | CGAGGTGCTTCGTTAAACAGCAACAACATAAGAGATGATGAACTTGTCGTCATCGTC |
| NO. 360 | |
| SEQ ID | CGAGGTGCTTCGTTACAGGTGGGTGTTGTGGTGGATCAGAGCCTTGTCGTCATCGTC |
| NO. 361 | |
| SEQ ID | CGAGGTGCTTCGTTAAACATTAGCAGCCCAGTCCAGCAGAATCTTGTCGTCATCGTC |
| NO. 362 | |
| SEQ ID | CGAGGTGCTTCGTTAAACCGGAGACAGTTCAGAGAACAGAGCCTTGTCGTCATCGTC |
| NO. 363 | |
| SEQ ID | CGAGGTGCTTCGTTACAGTTCGGTGTAGTATTCCAGCAGAGACTTGTCGTCATCGTC |
| NO. 364 | |
| SEQ ID | CGAGGTGCTTCGTTAAACTTCAAACGGAGATTTCGCAATGTGCTTGTCGTCATCGTC |
| NO. 365 | |
| SEQ ID | CGAGGTGCTTCGTTAAACCGGCGGAGCCCAAGACAGAACAACCTTGTCGTCATCGTC |
| NO. 366 | |
| SEQ ID | CGAGGTGCTTCGTTAAACGGTCACAAACAGATCCATTGCGGTCTTGTCGTCATCGTC |
| NO. 367 | |
| SEQ ID | CGAGGTGCTTCGTTAAACAAACAGGTCCATAGCGGTAACATACTTGTCGTCATCGTC |
| NO. 368 | |
| SEQ ID | CGAGGTGCTTCGTTATGCGCCAACAATCCAGGTAACAACGTACTTGTCGTCATCGTC |
| NO. 369 | |
| SEQ ID | CGAGGTGCTTCGTTACAGAACCGGAACAGAACCATACAGAGCCTTGTCGTCATCGTC |
| NO. 370 | |
| SEQ ID | CGAGGTGCTTCGTTACAGCAGCAGAGACAGGGTTTCCAGCAGAGCCTTGTCGTCATCGTC |
| NO. 371 | |
| SEQ ID | CGAGGTGCTTCGTTACAGCAGAGACAGGGTTTCCAGCAGAGCCTTGTCGTCATCGTC |
| NO. 372 | |
| SEQ ID | CGAGGTGCTTCGTTAGATCCAGTAAAACATATTGAAGATCAGCTTGTCGTCATCGTC |
| NO. 373 | |
| SEQ ID | CGAGGTGCTTCGTTAAACCGGAGAGGTGGTCGGGTCCAGAGACTTGTCGTCATCGTC |
| NO. 374 | |
| SEQ ID | CGAGGTGCTTCGTTACAGGTAGATGTTAGCCAGAGACATTTTCTTGTCGTCATCGTC |
| NO. 375 | |
| SEQ ID | CGAGGTGCTTCGTTAAACCAGGAAGTCCAGCGGGAAAGAGAACTTGTCGTCATCGTC |
| NO. 376 | |
| SEQ ID | CGAGGTGCTTCGTTACAGCTTCACGGTATATTCTTGCAGAAACTTGTCGTCATCGTC |
| NO. 377 | |
| SEQ ID | CGAGGTGCTTCGTTAGATTTTGGTAATCATAGCGTTCAGGATCTTGTCGTCATCGTC |
| NO. 378 | |
| SEQ ID | CGAGGTGCTTCGTTAGATGTAAGCGTGCAGTTCAGACAGTTTCTTGTCGTCATCGTC |
| NO. 379 | |
| SEQ ID | CGAGGTGCTTCGTTAAACGCTAACCGGCAGTAACAGCAGAGACTTGTCGTCATCGTC |
| NO. 380 | |
| SEQ ID | CGAGGTGCTTCGTTACAGGGTCACGGTCAGTTTTGCCATATACTTGTCGTCATCGTC |
| NO. 381 | |
| SEQ ID | CGAGGTGCTTCGTTACAGTTCACCCGGAGAACCATACATATACTTGTCGTCATCGTC |
| NO. 382 | |
| SEQ ID | CGAGGTGCTTCGTTAAACAATGTAAACAATAGAGAACGGCATAACCTTGTCGTCATCGTC |
| NO. 383 | |
| SEQ ID | CGAGGTGCTTCGTTAGATGTAAACGATAGAGAACGGCATAACCTTGTCGTCATCGTC |
| NO. 384 | |
| SEQ ID | CGAGGTGCTTCGTTAGATGTAAACAATAGAGAACGGCATAACCAGCTTGTCGTCATCGTC |
| NO. 385 | |
| SEQ ID | CGAGGTGCTTCGTTACAGGTAGAACAGGTGAGAAGAAGACATGGTCTTGTCGTCATCGTC |
| NO. 386 | |
| SEQ ID | CGAGGTGCTTCGTTACAGCAGGATAGAAATGCCGGTAATGAACTTGTCGTCATCGTC |
| NO. 387 | |
| SEQ ID | CGAGGTGCTTCGTTAAACCAGGAATGCACGGTGCAGCAGAACCTTGTCGTCATCGTC |
| NO. 388 | |
| SEQ ID | CGAGGTGCTTCGTTAAACCAGGTTCAGAACTTCAGAAGAGAACTTGTCGTCATCGTC |
| NO. 389 | |
| SEQ ID | CGAGGTGCTTCGTTACAGAAACTCCAGGTACGGACCCAGACGCTTGTCGTCATCGTC |
| NO. 390 | |
| SEQ ID | CGAGGTGCTTCGTTAAACCGGCATAATTTCACGAGACAGTTTCTTGTCGTCATCGTC |
| NO. 391 | |
| SEQ ID | CGAGGTGCTTCGTTAAACATAGTACGGTAAGATTGCCAGCAGCTTGTCGTCATCGTC |
| NO. 392 | |
| SEQ ID | CGAGGTGCTTCGTTAAGCGTTTGCGTTCAGGTCCGGCAGAAACTTGTCGTCATCGTC |
| NO. 393 | |
| SEQ ID | CGAGGTGCTTCGTTAGATCGGAGAAGAGATTTCAGAGGTGTACTTGTCGTCATCGTC |
| NO. 394 | |
| SEQ ID | CGAGGTGCTTCGTTACAGAGCCGGATAGCGATTGAACAGGTTCTTGTCGTCATCGTC |
| NO. 395 | |
| SEQ ID | CGAGGTGCTTCGTTACAGCAGCCAGGTAACTGATGCGATCAGGAACTTGTCGTCATCGTC |
| NO. 396 | |
| SEQ ID | CGAGGTGCTTCGTTACAGCCAGGTAACAGATGCGATCAGGAACTTGTCGTCATCGTC |
| NO. 397 | |
| SEQ ID | CGAGGTGCTTCGTTAAACAGCTTCCATAAATTCGTCCAGGAACTTGTCGTCATCGTC |
| NO. 398 | |
| SEQ ID | CGAGGTGCTTCGTTAGATCAGCGGGATAACCGGAGACAGAGCCTTGTCGTCATCGTC |
| NO. 399 | |
| SEQ ID | CGAGGTGCTTCGTTAAGCCAGTTGAACGGCAGGCCATAAATACTTGTCGTCATCGTC |
| NO. 400 | |
| SEQ ID | CGAGGTGCTTCGTTAAACAACACGTAACGGTTCCCATAAACGCTTGTCGTCATCGTC |
| NO. 401 | |
| SEQ ID | CGAGGTGCTTCGTTACAGCAGGCACGGGGTCATACCGAACAGCAGCTTGTCGTCATCGTC |
| NO. 402 | |
| SEQ ID | CGAGGTGCTTCGTTACAGGCACGGGGTCATACCGAACAGCAGCTTGTCGTCATCGTC |
| NO. 403 | |
| SEQ ID | CGAGGTGCTTCGTTACAGTTTCGCAATGGTTTCGTCCAGACCCTTGTCGTCATCGTC |
| NO. 404 | |
| SEQ ID | CGAGGTGCTTCGTTAAACAGGCGGCGGCATACCAATAACACGCTTGTCGTCATCGTC |
| NO. 405 | |
| SEQ ID | CGAGGTGCTTCGTTAAACTTCCGGTTCTTTTTCGTCCAGCAGCTTGTCGTCATCGTC |
| NO. 406 | |
| SEQ ID | CGAGGTGCTTCGTTAGATAGAAGAGTAATACTGGTCAATGAACTTGTCGTCATCGTC |
| NO. 407 | |
| SEQ ID | CGAGGTGCTTCGTTATGCTTCGTAGTTCAGACCCGTCAGAATCTTGTCGTCATCGTC |
| NO. 408 | |
| SEQ ID | CGAGGTGCTTCGTTACAGGGTCGGGTCAGCAGGGTCCAGAATCTTGTCGTCATCGTC |
| NO. 409 | |
| SEQ ID | CGAGGTGCTTCGTTACAGGAACGGAACCATAACAATCAGGATCTTGTCGTCATCGTC |
| NO. 410 | |
| SEQ ID | CGAGGTGCTTCGTTACATCAGGGTAACCAGGTACAGCATGAACTTGTCGTCATCGTC |
| NO. 411 | |
| SEQ ID | CGAGGTGCTTCGTTAAACGGTAACCAGGTACATGAACAGGAACTTGTCGTCATCGTC |
| NO. 412 | |
| SEQ ID | CGAGGTGCTTCGTTACAGCAGCGGGAAAAACACGTTCAGGAACTTGTCGTCATCGTC |
| NO. 413 | |
| SEQ ID | CGAGGTGCTTCGTTACAGTGCCAGGTTACCCAGAAAAATATACTTGTCGTCATCGTC |
| NO. 414 | |
| SEQ ID | CGAGGTGCTTCGTTAGGTGGTATAGAACACAGCAACCATTTTCTTGTCGTCATCGTC |
| NO. 415 | |
| SEQ ID | CGAGGTGCTTCGTTACAGGGTGTAGATAAACGGATTCAGAACCTTGTCGTCATCGTC |
| NO. 416 | |
| SEQ ID | CGAGGTGCTTCGTTAAACAAACACAACCAGTTCGTTCACATACTTGTCGTCATCGTC |
| NO. 417 | |
| SEQ ID | CGAGGTGCTTCGTTAAACAACGGTCACGGTGTAGATACCCAGGAACTTGTCGTCATCGTC |
| NO. 418 | |
| SEQ ID | CGAGGTGCTTCGTTAAACGGTAACGGTGTAGATACCCAGGAACTTGTCGTCATCGTC |
| NO. 419 | |
| SEQ ID | CGAGGTGCTTCGTTAGATAGATGCGAAAAAGGTGAACAGGAACTTGTCGTCATCGTC |
| NO. 420 | |
| SEQ ID | CGAGGTGCTTCGTTAGATAGCCAGCAGATAGCAGTCAATAGACTTGTCGTCATCGTC |
| NO. 421 | |
| SEQ ID | CGAGGTGCTTCGTTACAGGTGCGGAGAACCTTGCAGCAGAGACTTGTCGTCATCGTC |
| NO. 422 | |
| SEQ ID | CGAGGTGCTTCGTTACAGCGGGAACAGACGTTCACCCAGCATCTTGTCGTCATCGTC |
| NO. 423 | |
| SEQ ID | CGAGGTGCTTCGTTAAACAAACAGCAGAACAGAGAACAGGAACTTGTCGTCATCGTC |
| NO. 424 | |
| SEQ ID | CGAGGTGCTTCGTTAAACGCCCATAACCAGCGGCAGAACCAGCTTGTCGTCATCGTC |
| NO. 425 | |
| SEQ ID | CGAGGTGCTTCGTTACAGCGGCAGAACCAGATCATGCAGACGCTTGTCGTCATCGTC |
| NO. 426 | |
| SEQ ID | CGAGGTGCTTCGTTAAACAGAGTAAACGTGAGAACCAACAGCCTTGTCGTCATCGTC |
| NO. 427 | |
| SEQ ID | CGAGGTGCTTCGTTATGCCGGAAAAGAGATAATGCTCAGCAGCTTGTCGTCATCGTC |
| NO. 428 | |
| SEQ ID | CGAGGTGCTTCGTTACATGAACGGAGAGAAAACGGTCAGGAACTTGTCGTCATCGTC |
| NO. 429 | |
| SEQ ID | CGAGGTGCTTCGTTATGCAGAAGAGAATGCAGCGAACAGAACCTTGTCGTCATCGTC |
| NO. 430 | |
| SEQ ID | CGAGGTGCTTCGTTACAGACCCCACAGAGAAACCAGTAACAGCTTGTCGTCATCGTC |
| NO. 431 | |
| SEQ ID | CGAGGTGCTTCGTTAAACTTCAACAACACCACCCAGTTGATGCTTGTCGTCATCGTC |
| NO. 432 | |
| SEQ ID | CGAGGTGCTTCGTTAAACACGTTGAACTGCATCCAGGATAGACTTGTCGTCATCGTC |
| NO. 433 | |
| SEQ ID | CGAGGTGCTTCGTTACAGAGAGTTGCGATATTCAGACAGTTTCTTGTCGTCATCGTC |
| NO. 434 | |
| SEQ ID | CGAGGTGCTTCGTTAAATGAATTTCAGGTTCTGGTCTGCTAACAGCTTGTCGTCATCGTC |
| NO. 435 | |
| SEQ ID | CGAGGTGCTTCGTTACAGGTACGGCTCAAAATAATTCAGAACCTTGTCGTCATCGTC |
| NO. 436 | |
| SEQ ID | CGAGGTGCTTCGTTAAATAGACGGAATTGCGCCAACCAGAGCCTTGTCGTCATCGTC |
| NO. 437 | |
| SEQ ID | CGAGGTGCTTCGTTAAACACGGGTCAGCGGGTTATACAGGAACTTGTCGTCATCGTC |
| NO. 438 | |
| SEQ ID | CGAGGTGCTTCGTTAAACCGGGGTAGAGATTTCAACCATGTGCTTGTCGTCATCGTC |
| NO. 439 | |
| SEQ ID | CGAGGTGCTTCGTTAAACAATTTCGTCACCAGCCAGCAGTTTCTTGTCGTCATCGTC |
| NO. 440 | |
| SEQ ID | CGAGGTGCTTCGTTAAACGGTGTGAACAACCTGACCACCTAAAATCTTGTCGTCATCGTC |
| NO. 441 | |
| SEQ ID | CGAGGTGCTTCGTTACAGAAAAACAGGGCTACCCGCCATTGCCTTGTCGTCATCGTC |
| NO. 442 | |
| SEQ ID | CGAGGTGCTTCGTTAAGCTGCAATGATGGTGGTGCTCATGTACTTGTCGTCATCGTC |
| NO. 443 | |
| SEQ ID | CGAGGTGCTTCGTTACAGACCAAAAATCTGAGCAACCAGGATCTTGTCGTCATCGTC |
| NO. 444 | |
| SEQ ID | CGAGGTGCTTCGTTACAGACCCAGAACCTGTGCAATCAGAATCTTGTCGTCATCGTC |
| NO. 445 | |
| SEQ ID | CGAGGTGCTTCGTTACAGACCCAGGAACAGAGCAGCCCAGATACGCTTGTCGTCATCGTC |
| NO. 446 | |
| SEQ ID | CGAGGTGCTTCGTTACAGCAGAACCGTCCAACCACCCAGCAGCTTGTCGTCATCGTC |
| NO. 447 | |
| SEQ ID | CGAGGTGCTTCGTTAAACGCCATGAACCAGGAACTCAAACAGTTTCTTGTCGTCATCGTC |
| NO. 448 | |
| SEQ ID | CGAGGTGCTTCGTTAGGTGTACGGCAGCGGTTTAGCCAGTTTCTTGTCGTCATCGTC |
| NO. 449 | |
| SEQ ID | CGAGGTGCTTCGTTACAGCAGAACCGGCTGGTGAGACAGTTTCTTGTCGTCATCGTC |
| NO. 450 | |
| SEQ ID | CGAGGTGCTTCGTTACAGACCGTTTGCTTCGTCCAGCAGGAACTTGTCGTCATCGTC |
| NO. 451 | |
| SEQ ID | CGAGGTGCTTCGTTAGGTGGTAGCCAGAGAGTCTTGCAGATACTTGTCGTCATCGTC |
| NO. 452 | |
| SEQ ID | CGAGGTGCTTCGTTACAGAGAAGAAGAGATAGATGCCATCAGGAACTTGTCGTCATCGTC |
| NO. 453 | |
| SEQ ID | CGAGGTGCTTCGTTAAGAAGAAGAGATAGATGCCATCAGGAACTTGTCGTCATCGTC |
| NO. 454 | |
| SEQ ID | CGAGGTGCTTCGTTACAGGCTGCTTGAAATAGATGCCATCAGCTTGTCGTCATCGTC |
| NO. 455 | |
| SEQ ID | CGAGGTGCTTCGTTATGCCGAGAAGTACAGAGCGAACAGCAGCTTGTCGTCATCGTC |
| NO. 456 | |
| SEQ ID | CGAGGTGCTTCGTTAAATACCCGGATAGTGTTTCATCAGACGCTTGTCGTCATCGTC |
| NO. 457 | |
| SEQ ID | CGAGGTGCTTCGTTACAGAACACCAGAATATGCTGACATGAACTTGTCGTCATCGTC |
| NO. 458 | |
| SEQ ID | CGAGGTGCTTCGTTAAACGGTTGCCAGCAGCGGACCCATACCCTTGTCGTCATCGTC |
| NO. 459 | |
| SEQ ID | CGAGGTGCTTCGTTACAGCAGGATGGTGAAGTTTTCCAGAACAGACTTGTCGTCATCGTC |
| NO. 460 | |
| SEQ ID | CGAGGTGCTTCGTTAAACCAGCAGGATGGTGAAGTTTTCCAGAACCTTGTCGTCATCGTC |
| NO. 461 | |
| SEQ ID | CGAGGTGCTTCGTTACATTTTGGTTTCCAGGGTCATCAGGAACTTGTCGTCATCGTC |
| NO. 462 | |
| SEQ ID | CGAGGTGCTTCGTTAAACCAGGTAGAAAGAAACTGCAAACGTAACCTTGTCGTCATCGTC |
| NO. 463 | |
| SEQ ID | CGAGGTGCTTCGTTACAGCAGTAAGGTAACCTGAGACAGAGCCTTGTCGTCATCGTC |
| NO. 464 | |
| SEQ ID | CGAGGTGCTTCGTTAAACAGATGCAGCGTGTTCCGGGGTGTACTTGTCGTCATCGTC |
| NO. 465 | |
| SEQ ID | CGAGGTGCTTCGTTAGGTTTCCCAGAAGGTTTCAGCCAGAGACTTGTCGTCATCGTC |
| NO. 466 | |
| SEQ ID | CGAGGTGCTTCGTTAAACGGTGTTAGAGATAGCAGCCATACGCTTGTCGTCATCGTC |
| NO. 467 | |
| SEQ ID | CGAGGTGCTTCGTTACAGCGGAACAGACGGAGAAGCCAGAACCTTGTCGTCATCGTC |
| NO. 468 | |
| SEQ ID | CGAGGTGCTTCGTTAAACAGACGGAGATGCCAGAACCATGTACTTGTCGTCATCGTC |
| NO. 469 | |
| SEQ ID | CGAGGTGCTTCGTTACAGAGACACGTCCTGTTTCAGCAGCATCTTGTCGTCATCGTC |
| NO. 470 | |
| SEQ ID | CGAGGTGCTTCGTTACAGTGCAATTAACATATTCAGCAGTAACTTGTCGTCATCGTC |
| NO. 471 | |
| SEQ ID | CGAGGTGCTTCGTTACAGAGCAGATGCGTAACCGATCATAAACTTGTCGTCATCGTC |
| NO. 472 | |
| SEQ ID | CGAGGTGCTTCGTTATGCGTAACCAATCATAAACAGCAGGTACTTGTCGTCATCGTC |
| NO. 473 | |
| SEQ ID | CGAGGTGCTTCGTTAAACCGGGTTGATGTCCAGCGGCAGTTTCTTGTCGTCATCGTC |
| NO. 474 | |
| SEQ ID | CGAGGTGCTTCGTTAGATTTCAAATGACTGGTTCAGTTGTGACTTGTCGTCATCGTC |
| NO. 475 | |
| SEQ ID | CGAGGTGCTTCGTTAGATCAGGTGGATGCACGGGATAATCAGCTTGTCGTCATCGTC |
| NO. 476 | |
| SEQ ID | CGAGGTGCTTCGTTAGATTGAGCTACTTGCCCACAGCATTAACTTGTCGTCATCGTC |
| NO. 477 | |
| SEQ ID | CGAGGTGCTTCGTTAGATCAGAGACAGGTGTGAGATAATCATCTTGTCGTCATCGTC |
| NO. 478 | |
| SEQ ID | CGAGGTGCTTCGTTAAACAGAAACGTCCAGGTAGGTCAGGAACTTGTCGTCATCGTC |
| NO. 479 | |
| SEQ ID | CGAGGTGCTTCGTTAAACAGAAACATTGAAGGTCAGCAGTAACTTGTCGTCATCGTC |
| NO. 480 | |
| SEQ ID | CGAGGTGCTTCGTTAAACAAACGGGTTCATCCACAGCAGGCTCTTGTCGTCATCGTC |
| NO. 481 | |
| SEQ ID | CGAGGTGCTTCGTTAAACGTGATACCATTCTTCCTGGGTGAACTTGTCGTCATCGTC |
| NO. 482 | |
| SEQ ID | CGAGGTGCTTCGTTAAACAGAAATGTCCTGTGAAAACAGATTCTTGTCGTCATCGTC |
| NO. 483 | |
| SEQ ID NO. | |
| 484 | AAGCAGTGGTATCAACGCAGAGT XXXXXX TTT TTT TTT TTT TTT TTT TTT TTT TTT TTT VN |
| SEQ ID NO. | AAGCAGTGGTATCAACGCAGAGTCGACrGrG+G |
| 485 | |
| SEQ ID NO. | AAGCAGTGGTATCAACGCAGAGT |
| 486 | |
| SEQ ID NO. | CAAGCAGAAGACGGCATACGAGAT XXXXXXXX GTCTCGTGGGCTCGG |
| 487 | |
| SEQ ID NO. | AATGATACGGCGACCACCGAGATCTACACTCTTTCCCTACACGACGCTCTTCCGATCTNHNHNAAGCAGTGGTATC |
| 488 | AACGCAGAGT |
| SEQ ID NO. | AAGCAGTGGTATCAACGCAGAGT XXXXXX TTT TTT TTT TTT TTT TTT TTT TTT TTT TTT VN |
| 484 | |
| SEQ ID NO. | AAGCAGTGGTATCAACGCAGAGTCGACrGrG+G |
| 485 | |
| SEQ ID NO. | AAGCAGTGGTATCAACGCAGAGT |
| 486 | |
| SEQ ID NO. | CAAGCAGAAGACGGCATACGAGATXXXXXXXXGTCTCGTGGGCTCGG |
| 487 | |
| SEQ ID NO. | AATGATACGGCGACCACCGAGATCTACACTCTTTCCCTACACGACGCTCTTCCGATCTNHNHNAAGCAGTGGTATC |
| 488 | AACGCAGAGT |
| SEQ ID: 501 | ATGGACGACGACGACAAGCGTCAGTTCGGTCCGGACTGGATCGTTGCTTAACGAAGCACCTCGCTAAAAAAAAAA |
| | AAAAAAAAAAAAAAA |
| SEQ ID: 502 | ATGGACGACGACGACAAGATGGTTGGGGTCCGGACCCGCTGTACGTTTAACGAAGCACCTCGCTAAAAAAAAAA |
| | AAAAAAAAAAAAAAA |
| SEQ ID: 503 | ATGGACGACGACGACAAGAACCTGGCTCAGGACCTGGCTACCGTTTAACGAAGCACCTCGCTAAAAAAAAAAAAA |
| | AAAAAAAAAAAA |
| SEQ ID: 504 | ATGGACGACGACGACAAGCAGCTGGCTCGTCAGCAGGITCACGTTTAACGAAGCACCTCGCTAAAAAAAAAAAAA |
| | AAAAAAAAAAAA |
| SEQ ID: 505 | ATGGACGACGACGACAAGTTCCTGCAGGACGTTATGAACATCCTGTAACGAAGCACCTCGCTAAAAAAAAAAAAA |
| | AAAAAAAAAAAA |
| SEQ ID: 506 | ATGGACGACGACGACAAGCTGCTGCAGGAATACAACTGGGAACTGTAACGAAGCACCTCGCTAAAAAAAAAAAAA |
| | AAAAAAAAAAAA |
| SEQ ID: 507 | ATGGACGACGACGACAAGCGTATGATGGAATACGGTACCACCATGGTTTAACGAAGCACCTCGCTAAAAAAAAAA |
| | AAAAAAAAAAAAAAA |
| SEQ ID: 508 | ATGGACGACGACGACAAGGTTATGAACATCCTGCTGCAGTACGTTGTTTAACGAAGCACCTCGCTAAAAAAAAAAA |
| | AAAAAAAAAAAAAA |
| SEQ ID: 509 | ATGGACGACGACGACAAGGTTATGAACATCCTGCTGCAGTACGTTTAACGAAGCACCTCGCTAAAAAAAAAAAAAA |
| | AAAAAAAAAAA |
| SEQ ID: 510 | ATGGACGACGACGACAAGGAACTGGCTGAATACCTGTACAACATCTAACGAAGCACCTCGCTAAAAAAAAAAAAA |
| | AAAAAAAAAAAA |
| SEQ ID: 511 | ATGGACGACGACGACAAGATCCTGATGCACTGCCAGACCACCCTGTAACGAAGCACCTCGCTAAAAAAAAAAAAA |
| | AAAAAAAAAAAA |
| SEQ ID: 512 | ATGGACGACGACGACAAGATGCTGTACCAGCACCTGCTGCCGCTGTAACGAAGCACCTCGCTAAAAAAAAAAAAA |
| | AAAAAAAAAAAA |
| SEQ ID: 513 | ATGGACGACGACGACAAGGGTATCGTTGAACAGTGCTGCACCTCTATCTAACGAAGCACCTCGCTAAAAAAAAAAA |
| | AAAAAAAAAAAAAA |
| SEQ ID: 514 | ATGGACGACGACGACAAGGCTCTGTGGATGCGTCTGCTGCCGCTGCTGTAACGAAGCACCTCGCTAAAAAAAAAA |
| | AAAAAAAAAAAAAAA |
| SEQ ID: 515 | ATGGACGACGACGACAAGCTGGCTCTGTGGGGTCCGGACCCGGCTGCTTAACGAAGCACCTCGCTAAAAAAAAAA |
| | AAAAAAAAAAAAAAA |
| SEQ ID: 516 | ATGGACGACGACGACAAGCGTCTGCTGCCGCTGCTGGCTCTGCTGGCTCTGTAACGAAGCACCTCGCTAAAAAAAA |
| | AAAAAAAAAAAAAAAAA |
| SEQ ID: 517 | ATGGACGACGACGACAAGGCTCTGTGGATGCGTCTGCTGCCGCTGTAACGAAGCACCTCGCTAAAAAAAAAAAAA |
| | AAAAAAAAAAAA |
| SEQ ID: 518 | ATGGACGACGACGACAAGCACCTGGTTGAAGCTCTGTACCTGGTTTAACGAAGCACCTCGCTAAAAAAAAAAAAAA |
| | AAAAAAAAAAA |
| SEQ ID: 519 | ATGGACGACGACGACAAGTCTCTGCAGAAACGTGGTATCGTTGAACAGTAACGAAGCACCTCGCTAAAAAAAAAA |
| | AAAAAAAAAAAAAAA |
| SEQ ID: 520 | ATGGACGACGACGACAAGTCTCTGCAGCCGCTGGCTCTGGAAGGTTAACGAAGCACCTCGCTAAAAAAAAAAAAA |
| | AAAAAAAAAAAA |
| SEQ ID: 521 | ATGGACGACGACGACAAGTCTCTGTACCAGCTGGAAAACTACTGCTAACGAAGCACCTCGCTAAAAAAAAAAAAAA |
| | AAAAAAAAAAA |
| SEQ ID: 522 | ATGGACGACGACGACAAGGTTTGCGGTGAACGTGGTTTCTTCTACACCTAACGAAGCACCTCGCTAAAAAAAAAAA |
| | AAAAAAAAAAAAAA |
| SEQ ID: 523 | ATGGACGACGACGACAAGGCTCTGTGGGGTCCGGACCCGGCTGCTGCTTAACGAAGCACCTCGCTAAAAAAAAAA |
| | AAAAAAAAAAAAAAA |
| SEQ ID: 524 | ATGGACGACGACGACAAGCGTCTGCTGCCGCTGCTGGCTCTGCTGTAACGAAGCACCTCGCTAAAAAAAAAAAAA |
| | AAAAAAAAAAAA |
| SEQ ID: 525 | ATGGACGACGACGACAAGTGGGGTCCGGACCCGGCTGCTGCTTAACGAAGCACCTCGCTAAAAAAAAAAAAAAAA |
| | AAAAAAAAA |
| SEQ ID: 526 | ATGGACGACGACGACAAGTTCCTGATCGTTCTGTCTGTTGCTCTGTAACGAAGCACCTCGCTAAAAAAAAAAAAAA |
| | AAAAAAAAAAA |
| SEQ ID: 527 | ATGGACGACGACGACAAGAAACTGCAGGTTTTCCTGATCGTTCTGTAACGAAGCACCTCGCTAAAAAAAAAAAAAA |
| | AAAAAAAAAAA |
| SEQ ID: 528 | ATGGACGACGACGACAAGTTCCTGTGGTCTGTTTTCATGCTGATCTAACGAAGCACCTCGCTAAAAAAAAAAAAAA |
| | AAAAAAAAAAA |
| SEQ ID: 529 | ATGGACGACGACGACAAGTTCCTGTTCGCTGTTGGTTTCTACCTGTAACGAAGCACCTCGCTAAAAAAAAAAAAAA |
| | AAAAAAAAAAA |
| SEQ ID: 530 | ATGGACGACGACGACAAGCTGAACATCGACCTGCTGTGGTCTGTTTAACGAAGCACCTCGCTAAAAAAAAAAAAAA |
| | AAAAAAAAAAA |
| SEQ ID: 531 | ATGGACGACGACGACAAGGTTCTGTTCGGTCTGGGTTTCGCTATCTAACGAAGCACCTCGCTAAAAAAAAAAAAAA |
| | AAAAAAAAAAA |
| SEQ ID: 532 | ATGGACGACGACGACAAGTTCCTGTGGTCTGTTTTCTGGCTGATCTAACGAAGCACCTCGCTAAAAAAAAAAAAAA |
| | AAAAAAAAAAA |
| SEQ ID: 533 | ATGGACGACGACGACAAGAACCTGTTCCTGTTCCTGTTCGCTGTTTAACGAAGCACCTCGCTAAAAAAAAAAAAAA |
| | AAAAAAAAAAA |
| SEQ ID: 534 | ATGGACGACGACGACAAGTACCTGCTGCTGCGTGTTCTGAACATCTAACGAAGCACCTCGCTAAAAAAAAAAAAAA |
| | AAAAAAAAAAA |
| SEQ ID: 535 | ATGGACGACGACGACAAGCACCTGTGCGGTTCTCACCTGGTTGAAGCTTAACGAAGCACCTCGCTAAAAAAAAAAA |
| | AAAAAAAAAAAAAA |
| SEQ ID: 536 | ATGGACGACGACGACAAGTCTCACCTGGTTGAAGCTCTGTACCTGGTTTAACGAAGCACCTCGCTAAAAAAAAAAA |
| | AAAAAAAAAAAAAA |
| SEQ ID: 537 | ATGGACGACGACGACAAGCTGTGCGGTTCTCACCTGGTTGAAGCTCTGTAACGAAGCACCTCGCTAAAAAAAAAAA |
| | AAAAAAAAAAAAAA |
| SEQ ID: 538 | ATGGACGACGACGACAAGGCTCTGACCGCTGTTGCTGAAGAAGTTTAACGAAGCACCTCGCTAAAAAAAAAAAAA |
| | AAAAAAAAAAAA |
| SEQ ID: 539 | ATGGACGACGACGACAAGTCTCTGTACCACGTTTACGAAGTTAACCTGTAACGAAGCACCTCGCTAAAAAAAAAAA |
| | AAAAAAAAAAAAAA |
| SEQ ID: 540 | ATGGACGACGACGACAAGACCATCGCTGACTTCTGGCAGATGGTTTAACGAAGCACCTCGCTAAAAAAAAAAAAA |
| | AAAAAAAAAAAA |
| SEQ ID: 541 | ATGGACGACGACGACAAGGTTATCGTTATGCTGACCCCGCTGGTTTAACGAAGCACCTCGCTAAAAAAAAAAAAAA |
| | AAAAAAAAAAA |
| SEQ ID: 542 | ATGGACGACGACGACAAGCTGCTGCCGCCGCTGCTGGAACACCTGTAACGAAGCACCTCGCTAAAAAAAAAAAAA |
| | AAAAAAAAAAAA |
| SEQ ID: 543 | ATGGACGACGACGACAAGTCTCTGGCTGCTGGTGTTAAACTGCTGTAACGAAGCACCTCGCTAAAAAAAAAAAAAA |
| | AAAAAAAAAAA |
| SEQ ID: 544 | ATGGACGACGACGACAAGTCTCTGTCTCCGCTGCAGGCTGAACTGTAACGAAGCACCTCGCTAAAAAAAAAAAAAA |
| | AAAAAAAAAAA |
| SEQ ID: 545 | ATGGACGACGACGACAAGATGGTTTGGGAATCTGGTTGCACCGTTTAACGAAGCACCTCGCTAAAAAAAAAAAAA |
| | AAAAAAAAAAAA |
| SEQ ID: 546 | ATGGACGACGACGACAAGGTTATGATCATCGTTTCTTCTCTGGCTGTTTAACGAAGCACCTCGCTAAAAAAAAAAAA |
| | AAAAAAAAAAAAA |
| SEQ ID: 547 | ATGGACGACGACGACAAGGCTCTGGGTGACCTGTTCCAGTCTATCTAACGAAGCACCTCGCTAAAAAAAAAAAAAA |
| | AAAAAAAAAAA |
| SEQ ID: 548 | ATGGACGACGACGACAAGGACCTGACGTCTTTCCTGCTGTCTCTGTAACGAAGCACCTCGCTAAAAAAAAAAAAAA |
| | AAAAAAAAAAA |
| SEQ ID: 549 | ATGGACGACGACGACAAGGAAATCCTGGGTGCTCTGCTGTCTATCTAACGAAGCACCTCGCTAAAAAAAAAAAAAA |
| | AAAAAAAAAAA |
| SEQ ID: 550 | ATGGACGACGACGACAAGTTCCTGCTGTCTCTGTTCTCTCTGTGGCTGTAACGAAGCACCTCGCTAAAAAAAAAAAA |
| | AAAAAAAAAAAAA |
| SEQ ID: 551 | ATGGACGACGACGACAAGATCCTGGCTGTTGACGGTGTTCTGTCTGTTTAACGAAGCACCTCGCTAAAAAAAAAAA |
| | AAAAAAAAAAAAAA |
| SEQ ID: 552 | ATGGACGACGACGACAAGATCCTGGGTGCTCTGCTGTCTATCCTGTAACGAAGCACCTCGCTAAAAAAAAAAAAAA |
| | AAAAAAAAAAA |
| SEQ ID: 553 | ATGGACGACGACGACAAGATCCTGAAAGACTTCTCTATCCTGCTGTAACGAAGCACCTCGCTAAAAAAAAAAAAAA |
| | AAAAAAAAAAA |
| SEQ ID: 554 | ATGGACGACGACGACAAGATCCTGTCTGCTCACGTTGCTACCGCTTAACGAAGCACCTCGCTAAAAAAAAAAAAAA |
| | AAAAAAAAAAA |
| SEQ ID: 555 | ATGGACGACGACGACAAGCTGCTGATCGACCTGACCTCTTTCCTGTAACGAAGCACCTCGCTAAAAAAAAAAAAAA |
| | AAAAAAAAAAA |
| SEQ ID: 556 | ATGGACGACGACGACAAGCTGCTGATGGAAGGTGTTCCGAAATCTCTGTAACGAAGCACCTCGCTAAAAAAAAAA |
| | AAAAAAAAAAAAAAA |
| SEQ ID: 557 | ATGGACGACGACGACAAGICTATCTCTGTTCTGATCTCTGCTCTGTAACGAAGCACCTCGCTAAAAAAAAAAAAAAA |
| | AAAAAAAAAA |
| SEQ ID: 558 | ATGGACGACGACGACAAGTCTCTGAACTACTCTGGTGTTAAAGAACTGTAACGAAGCACCTCGCTAAAAAAAAAAA |
| | AAAAAAAAAAAAAA |
| SEQ ID: 559 | ATGGACGACGACGACAAGTCTGTTCACTCTCTGCACATCTGGTCTCTGTAACGAAGCACCTCGCTAAAAAAAAAAA |
| | AAAAAAAAAAAAAA |
| SEQ ID: 560 | ATGGACGACGACGACAAGGTTGTTACCGGTGTTCTGGTTTACCTGTAACGAAGCACCTCGCTAAAAAAAAAAAAAA |
| | AAAAAAAAAAA |
| SEQ ID: 561 | ATGGACGACGACGACAAGTTCATCTTCTCTATCCTGGTTCTGGCTTAACGAAGCACCTCGCTAAAAAAAAAAAAAAA |
| | AAAAAAAAAA |
| SEQ ID: 562 | ATGGACGACGACGACAAGATCCAGGCTACCGTTATGATCATCGTTTAACGAAGCACCTCGCTAAAAAAAAAAAAAA |
| | AAAAAAAAAAA |
| SEQ ID: 563 | ATGGACGACGACGACAAGAAAATGTACGCTTTCACCCTGGAATCTTAACGAAGCACCTCGCTAAAAAAAAAAAAAA |
| | AAAAAAAAAAA |
| SEQ ID: 564 | ATGGACGACGACGACAAGAAATCTCTGAACTACTCTGGTGTTAAATAACGAAGCACCTCGCTAAAAAAAAAAAAAA |
| | AAAAAAAAAAA |
| SEQ ID: 565 | ATGGACGACGACGACAAGCTGGCTGTTGACGGTGTTCTGTCTGTTTAACGAAGCACCTCGCTAAAAAAAAAAAAAA |
| | AAAAAAAAAAA |
| SEQ ID: 566 | ATGGACGACGACGACAAGCTGCTGTCTCTGTTCTCTCTGTGGCTGTAACGAAGCACCTCGCTAAAAAAAAAAAAAA |
| | AAAAAAAAAAA |
| SEQ ID: 567 | ATGGACGACGACGACAAGCGTCTGCTGTACCCGGACTACCAGATCTAACGAAGCACCTCGCTAAAAAAAAAAAAA |
| | AAAAAAAAAAAA |
| SEQ ID: 568 | ATGGACGACGACGACAAGACCATGCACTCTCTGACCATCCAGATGTAACGAAGCACCTCGCTAAAAAAAAAAAAAA |
| | AAAAAAAAAAA |
| SEQ ID: 569 | ATGGACGACGACGACAAGGTTGCTGCTAACATCGTTCTGACCGTTTAACGAAGCACCTCGCTAAAAAAAAAAAAAA |
| | AAAAAAAAAAA |
| SEQ ID: 570 | ATGGACGACGACGACAAGTGCCTGGGTCACAACCACAAAGAAGTTTAACGAAGCACCTCGCTAAAAAAAAAAAAA |
| | AAAAAAAAAAAA |
| SEQ ID: 571 | ATGGACGACGACGACAAGAAAATCGCTGACCCGATCTGCACCTTCATCTAACGAAGCACCTCGCTAAAAAAAAAAA |
| | AAAAAAAAAAAAAA |
| SEQ ID: 572 | ATGGACGACGACGACAAGAAAATGTACGCTTTCACCCTGGAATCTGTTTAACGAAGCACCTCGCTAAAAAAAAAAA |
| | AAAAAAAAAAAAAA |
| SEQ ID: 573 | ATGGACGACGACGACAAGCTGCTGATCGACCTGACCTCTTTCCTGCTGTAACGAAGCACCTCGCTAAAAAAAAAAA |
| | AAAAAAAAAAAAAA |
| SEQ ID: 574 | ATGGACGACGACGACAAGCTGCTGTCTATCCTGTGCATCTGGGTTTAACGAAGCACCTCGCTAAAAAAAAAAAAAA |
| | AAAAAAAAAAA |
| SEQ ID: 575 | ATGGACGACGACGACAAGTCTCTGTACAACACCGTTGCTACCCTGTACTAACGAAGCACCTCGCTAAAAAAAAAAA |
| | AAAAAAAAAAAAAA |
| SEQ ID: 576 | ATGGACGACGACGACAAGTTCCTGGGTAAAATCTGGCCGTCTTACAAATAACGAAGCACCTCGCTAAAAAAAAAAA |
| | AAAAAAAAAAAAAA |
| SEQ ID: 577 | ATGGACGACGACGACAAGCTGGTTGGTCCGACCCCGGTTAACATCTAACGAAGCACCTCGCTAAAAAAAAAAAAA |
| | AAAAAAAAAAAA |
| SEQ ID: 578 | ATGGACGACGACGACAAGGCTCTGGTTGAAATCTGCACCGAAATGTAACGAAGCACCTCGCTAAAAAAAAAAAAA |
| | AAAAAAAAAAAA |
| SEQ ID: 579 | ATGGACGACGACGACAAGGTTATCTACCAGTACATGGACGACCTGTAACGAAGCACCTCGCTAAAAAAAAAAAAA |
| | AAAAAAAAAAAA |
| SEQ ID: 580 | ATGGACGACGACGACAAGATCCTGAAAGAACCGGTTCACGGTGTTTAACGAAGCACCTCGCTAAAAAAAAAAAAA |
| | AAAAAAAAAAAA |
| SEQ ID: 581 | ATGGACGACGACGACAAGGCTATCATCCGTATCCTGCAGCAGCTGTAACGAAGCACCTCGCTAAAAAAAAAAAAA |
| | AAAAAAAAAAAA |
| SEQ ID: 582 | ATGGACGACGACGACAAGCGTGGTCCGGGTCGTGGTTTCGTTACCATCTAACGAAGCACCTCGCTAAAAAAAAAAA |
| | AAAAAAAAAAAAAA |
| SEQ ID: 583 | ATGGACGACGACGACAAGTCTCTGCTGAACGCTACCGACATCGCTGTTTAACGAAGCACCTCGCTAAAAAAAAAAA |
| | AAAAAAAAAAAAAA |
| SEQ ID: 584 | ATGGACGACGACGACAAGCTGCTGAACGCTACCGACATCGCTGTTTAACGAAGCACCTCGCTAAAAAAAAAAAAA |
| | AAAAAAAAAAAA |
| SEQ ID: 585 | ATGGACGACGACGACAAGCCGCTGACCTTCGGTTGGTGCTACAAACTGTAACGAAGCACCTCGCTAAAAAAAAAA |
| | AAAAAAAAAAAAAAA |
| SEQ ID: 586 | ATGGACGACGACGACAAGGTTCTGGAATGGCGTTTCGACTCTCGTCTGTAACGAAGCACCTCGCTAAAAAAAAAAA |
| | AAAAAAAAAAAAAA |
| SEQ ID: 587 | ATGGACGACGACGACAAGGGTATCCTGGGTTTCGTTTTCACCCTGTAACGAAGCACCTCGCTAAAAAAAAAAAAAA |
| | AAAAAAAAAAA |
| SEQ ID: 588 | ATGGACGACGACGACAAGAAACTGTACCAGAACCCGACCACCTACATCTAACGAAGCACCTCGCTAAAAAAAAAAA |
| | AAAAAAAAAAAAAA |
| SEQ ID: 589 | ATGGACGACGACGACAAGCGTCTGTACCAGAACCCGACCACCTACATCTAACGAAGCACCTCGCTAAAAAAAAAAA |
| | AAAAAAAAAAAAAA |
| SEQ ID: 590 | ATGGACGACGACGACAAGGCTATCATGGACAAAAACATCATCCTGTAACGAAGCACCTCGCTAAAAAAAAAAAAA |
| | AAAAAAAAAAAA |
| SEQ ID: 591 | ATGGACGACGACGACAAGTTCATGTACTCTGACTTCCACTTCATCTAACGAAGCACCTCGCTAAAAAAAAAAAAAA |
| | AAAAAAAAAAA |
| SEQ ID: 592 | ATGGACGACGACGACAAGAAACTGGTTGCTCTGGGTATCAACGCTGTTTAACGAAGCACCTCGCTAAAAAAAAAAA |
| | AAAAAAAAAAAAAA |
| SEQ ID: 593 | ATGGACGACGACGACAAGCTGCTGTTCAACATCCTGGGTGGTTGGGTTTAACGAAGCACCTCGCTAAAAAAAAAAA |
| | AAAAAAAAAAAAAA |
| SEQ ID: 594 | ATGGACGACGACGACAAGTGCATCAACGGTGTTTGCTGGACCGTTTAACGAAGCACCTCGCTAAAAAAAAAAAAA |
| | AAAAAAAAAAAA |
| SEQ ID: 595 | ATGGACGACGACGACAAGTACCTGCTGCCGCGTCGTGGTCCGCGTCTGTAACGAAGCACCTCGCTAAAAAAAAAA |
| | AAAAAAAAAAAAAAA |
| SEQ ID: 596 | ATGGACGACGACGACAAGTACCTGGTTGCTCTGGGTATCAACGCTGTTTAACGAAGCACCTCGCTAAAAAAAAAAA |
| | AAAAAAAAAAAAAA |
| SEQ ID: 597 | ATGGACGACGACGACAAGTACCTGGTTGCTCTGGGTGTTAACGCTGTTTAACGAAGCACCTCGCTAAAAAAAAAAA |
| | AAAAAAAAAAAAAA |
| SEQ ID: 598 | ATGGACGACGACGACAAGAAACTGGTTGCTCTGGGTATCAACAACGTTTAACGAAGCACCTCGCTAAAAAAAAAA |
| | AAAAAAAAAAAAAAA |
| SEQ ID: 599 | ATGGACGACGACGACAAGTCTCTGGTTGCTCTGGGTATCAACGCTGTTTAACGAAGCACCTCGCTAAAAAAAAAAA |
| | AAAAAAAAAAAAAA |
| SEQ ID: 600 | ATGGACGACGACGACAAGAAAATCGTTGCTCTGGGTATCAACGCTGTTTAACGAAGCACCTCGCTAAAAAAAAAAA |
| | AAAAAAAAAAAAAA |
| SEQ ID: 601 | ATGGACGACGACGACAAGTGCCTGGGTGGTCTGCTGACCATGGTTTAACGAAGCACCTCGCTAAAAAAAAAAAAA |
| | AAAAAAAAAAAA |
| SEQ ID: 602 | ATGGACGACGACGACAAGTACCTGCAGCAGAACTGGTGGACCCTGTAACGAAGCACCTCGCTAAAAAAAAAAAAA |
| | AAAAAAAAAAAA |
| SEQ ID: 603 | ATGGACGACGACGACAAGTACCTGCTGGAAATGCTGTGGCGTCTGTAACGAAGCACCTCGCTAAAAAAAAAAAAA |
| | AAAAAAAAAAAA |
| SEQ ID: 604 | ATGGACGACGACGACAAGTACGTTCTGGACCACCTGATCGTTGTTTAACGAAGCACCTCGCTAAAAAAAAAAAAAA |
| | AAAAAAAAAAA |
| SEQ ID: 605 | ATGGACGACGACGACAAGGGICTGTGCACCCTGGTTGCTATGCTGTAACGAAGCACCTCGCTAAAAAAAAAAAAA |
| | AAAAAAAAAAAA |
| SEQ ID: 606 | ATGGACGACGACGACAAGTACCTGCTGCCGGGTTGGAAACTGTAACGAAGCACCTCGCTAAAAAAAAAAAAAAAA |
| | AAAAAAAAA |
| SEQ ID: 607 | ATGGACGACGACGACAAGTCTCTGATCTCTGGTATGTGGCTGCTGTAACGAAGCACCTCGCTAAAAAAAAAAAAAA |
| | AAAAAAAAAAA |
| SEQ ID: 608 | ATGGACGACGACGACAAGACCCTGCTGGCTAACGTTACCGCTGTTTAACGAAGCACCTCGCTAAAAAAAAAAAAAA |
| | AAAAAAAAAAA |
| SEQ ID: 609 | ATGGACGACGACGACAAGTTCCTGTACGCTCTGGCTCTGCTGCTGTAACGAAGCACCTCGCTAAAAAAAAAAAAAA |
| | AAAAAAAAAAA |
| SEQ ID: 610 | ATGGACGACGACGACAAGGAAGTTAAAGAAAAACACGAATTCCTGTAACGAAGCACCTCGCTAAAAAAAAAAAAA |
| | AAAAAAAAAAAA |
| SEQ ID: 611 | ATGGACGACGACGACAAGATCCTGATGAACGACCAGGAAGTTGGTGTTTAACGAAGCACCTCGCTAAAAAAAAAA |
| | AAAAAAAAAAAAAAA |
| SEQ ID: 612 | ATGGACGACGACGACAAGGGTATCATCTACATCATCTACAAACTGTAACGAAGCACCTCGCTAAAAAAAAAAAAAA |
| | AAAAAAAAAAA |
| SEQ ID: 613 | ATGGACGACGACGACAAGGAAGCTGCTGGTATCGGTATCCTGACCGTTTAACGAAGCACCTCGCTAAAAAAAAAA |
| | AAAAAAAAAAAAAAA |
| SEQ ID: 614 | ATGGACGACGACGACAAGGAACTGGCTGGTATCGGTATCCTGACCGTTTAACGAAGCACCTCGCTAAAAAAAAAA |
| | AAAAAAAAAAAAAAA |
| SEQ ID: 615 | ATGGACGACGACGACAAGGCTCTGGCTGGTATCGGTATCCTGACCGTTTAACGAAGCACCTCGCTAAAAAAAAAAA |
| | AAAAAAAAAAAAAA |
| SEQ ID: 616 | ATGGACGACGACGACAAGGCTGCTGGTATCGGTATCCTGACCGTTTAACGAAGCACCTCGCTAAAAAAAAAAAAA |
| | AAAAAAAAAAAA |
| SEQ ID: 617 | ATGGACGACGACGACAAGGCTCTGGGTATCGGTATCCTGACCGTTTAACGAAGCACCTCGCTAAAAAAAAAAAAA |
| | AAAAAAAAAAAA |
| SEQ ID: 618 | ATGGACGACGACGACAAGCTGCTGGCTGGTATCGGTACCGTTCCGATCTAACGAAGCACCTCGCTAAAAAAAAAAA |
| | AAAAAAAAAAAAAA |
| SEQ ID: 619 | ATGGACGACGACGACAAGTGCACCTCTATCTGCTCTCTGTACTAACGAAGCACCTCGCTAAAAAAAAAAAAAAAAA |
| | AAAAAAAA |
| SEQ ID: 620 | ATGGACGACGACGACAAGTGCGGTTCTCACCTGGTTGAAGCTCTGTACTAACGAAGCACCTCGCTAAAAAAAAAAA |
| | AAAAAAAAAAAAAA |
| SEQ ID: 621 | ATGGACGACGACGACAAGGGTTCTCACCTGGTTGAAGCTCTGTACTAACGAAGCACCTCGCTAAAAAAAAAAAAAA |
| | AAAAAAAAAAA |
| SEQ ID: 622 | ATGGACGACGACGACAAGTGCCTGGAACTGGCTGAATACCTGTACTAACGAAGCACCTCGCTAAAAAAAAAAAAA |
| | AAAAAAAAAAAA |
| SEQ ID: 623 | ATGGACGACGACGACAAGTCTACCGCTAACACCAACATGTTCACCTACTAACGAAGCACCTCGCTAAAAAAAAAAA |
| | AAAAAAAAAAAAAA |
| SEQ ID: 624 | ATGGACGACGACGACAAGAAATGCCTGGAACTGGCTGAATACCTGTACTAACGAAGCACCTCGCTAAAAAAAAAA |
| | AAAAAAAAAAAAAAA |
| SEQ ID: 625 | ATGGACGACGACGACAAGCAGCAGGACAAACACTACGACCTGTCTTACTAACGAAGCACCTCGCTAAAAAAAAAA |
| | AAAAAAAAAAAAAAA |
| SEQ ID: 626 | ATGGACGACGACGACAAGGTTTCTGCTACCGCTGGTACCACCGTTTACTAACGAAGCACCTCGCTAAAAAAAAAAA |
| | AAAAAAAAAAAAAA |
| SEQ ID: 627 | ATGGACGACGACGACAAGTCTACCAAAGTTATCGACTTCCACTACTAACGAAGCACCTCGCTAAAAAAAAAAAAAA |
| | AAAAAAAAAAA |
| SEQ ID: 628 | ATGGACGACGACGACAAGTACCTGGCTTGCGAACGTCTGCTGTACTAACGAAGCACCTCGCTAAAAAAAAAAAAA |
| | AAAAAAAAAAAA |
| SEQ ID: 629 | ATGGACGACGACGACAAGGITACCGACGCTGCTCACCTGCTGATCTAACGAAGCACCTCGCTAAAAAAAAAAAAAA |
| | AAAAAAAAAAA |
| SEQ ID: 630 | ATGGACGACGACGACAAGCCGACCGAAAAAGGTGCTAACGAATACTAACGAAGCACCTCGCTAAAAAAAAAAAAA |
| | AAAAAAAAAAAA |
| SEQ ID: 631 | ATGGACGACGACGACAAGCTGATCGACCTGACCTCTTTCCTGCTGTAACGAAGCACCTCGCTAAAAAAAAAAAAAA |
| | AAAAAAAAAAA |
| SEQ ID: 632 | ATGGACGACGACGACAAGAAACCGACCGAAAAAGGTGCTAACGAATACTAACGAAGCACCTCGCTAAAAAAAAAA |
| | AAAAAAAAAAAAAAA |
| SEQ ID: 633 | ATGGACGACGACGACAAGGTTGTTACCGACGCTGCTCACCTGCTGATCTAACGAAGCACCTCGCTAAAAAAAAAAA |
| | AAAAAAAAAAAAAA |
| SEQ ID: 634 | ATGGACGACGACGACAAGCTGACGTCTTTTCCTGCTGTCTCTGTTCTAACGAAGCACCTCGCTAAAAAAAAAAAAAAA |
| | AAAAAAAAAA |
| SEQ ID: 635 | ATGGACGACGACGACAAGTCTACCAACGTTGGTTCTAACACCTACTAACGAAGCACCTCGCTAAAAAAAAAAAAAA |
| | AAAAAAAAAAA |
| SEQ ID: 636 | ATGGACGACGACGACAAGTCTTCTACCAACGTTGGTTCTAACACCTACTAACGAAGCACCTCGCTAAAAAAAAAAA |
| | AAAAAAAAAAAAAA |
| SEQ ID: 637 | ATGGACGACGACGACAAGCTGACCTCTCTGACCATCCTGCAGCTGTACTAACGAAGCACCTCGCTAAAAAAAAAAA |
| | AAAAAAAAAAAAAA |
| SEQ ID: 638 | ATGGACGACGACGACAAGCCGACCCACGAAGAACACCTGTTCTACTAACGAAGCACCTCGCTAAAAAAAAAAAAA |
| | AAAAAAAAAAAA |
| SEQ ID: 639 | ATGGACGACGACGACAAGATCCCGACCCACGAAGAACACCTGTTCTACTAACGAAGCACCTCGCTAAAAAAAAAAA |
| | AAAAAAAAAAAAAA |
| SEQ ID: 640 | ATGGACGACGACGACAAGACCTCTCTGACCATCCTGCAGCTGTACTAACGAAGCACCTCGCTAAAAAAAAAAAAAA |
| | AAAAAAAAAAA |
| SEQ ID: 641 | ATGGACGACGACGACAAGTCTACCGGTCACATGATCCTGGCTTACTAACGAAGCACCTCGCTAAAAAAAAAAAAAA |
| | AAAAAAAAAAA |
| SEQ ID: 642 | ATGGACGACGACGACAAGTTCGGTGACCACCCGGGTCACTCTTACTAACGAAGCACCTCGCTAAAAAAAAAAAAAA |
| | AAAAAAAAAAA |
| SEQ ID: 643 | ATGGACGACGACGACAAGATCTCTACCGGTCACATGATCCTGGCTTACTAACGAAGCACCTCGCTAAAAAAAAAAA |
| | AAAAAAAAAAAAAA |
| SEQ ID: 644 | ATGGACGACGACGACAAGTTCCAGGACTCTGGTCTGCTGTACTAACGAAGCACCTCGCTAAAAAAAAAAAAAAAA |
| | AAAAAAAAA |
| SEQ ID: 645 | ATGGACGACGACGACAAGCAGCTGTTCCAGGACTCTGGTCTGCTGTACTAACGAAGCACCTCGCTAAAAAAAAAAA |
| | AAAAAAAAAAAAAA |
| SEQ ID: 646 | ATGGACGACGACGACAAGCTGTCTTGGCACGACGACCTGACCCAGTACTAACGAAGCACCTCGCTAAAAAAAAAA |
| | AAAAAAAAAAAAAAA |
| SEQ ID: 647 | ATGGACGACGACGACAAGTGGCCGGACGAAGGTGCTTCTCTGTACTAACGAAGCACCTCGCTAAAAAAAAAAAAA |
| | AAAAAAAAAAAA |
| SEQ ID: 648 | ATGGACGACGACGACAAGGCTCTGGACATCGAAATCGCTACCTACTAACGAAGCACCTCGCTAAAAAAAAAAAAA |
| | AAAAAAAAAAAA |
| SEQ ID: 649 | ATGGACGACGACGACAAGCTGGCTCTGGACATCGAAATCGCTACCTACTAACGAAGCACCTCGCTAAAAAAAAAAA |
| | AAAAAAAAAAAAAA |
| SEQ ID: 650 | ATGGACGACGACGACAAGGTTTGCGGTGAACGTGGTTTCTTCTACACCTAACGAAGCACCTCGCTAAAAAAAAAAA |
| | AAAAAAAAAAAAAA |
| SEQ ID: 651 | ATGGACGACGACGACAAGGGTGAACGTGGTTTCTTCTACACCTAACGAAGCACCTCGCTAAAAAAAAAAAAAAAA |
| | AAAAAAAAA |
| SEQ ID: 652 | ATGGACGACGACGACAAGCTGGTTTGCGGTGAACGTGGTTTCTTCTACTAACGAAGCACCTCGCTAAAAAAAAAAA |
| | AAAAAAAAAAAAAA |
| SEQ ID: 653 | ATGGACGACGACGACAAGGCTCTGTGGGGTCCGGACCCGGCTGCTGCTTTCTAACGAAGCACCTCGCTAAAAAAA |
| | AAAAAAAAAAAAAAAAAA |
| SEQ ID: 654 | ATGGACGACGACGACAAGTGCACCGAACTGAAACTGTCTGACTACTAACGAAGCACCTCGCTAAAAAAAAAAAAA |
| | AAAAAAAAAAAA |
| SEQ ID: 655 | ATGGACGACGACGACAAGCACTCTAACCTGAACGACGCTACCTACTAACGAAGCACCTCGCTAAAAAAAAAAAAAA |
| | AAAAAAAAAAA |
| SEQ ID: 656 | ATGGACGACGACGACAAGAAATCTTGCCTGCCGGCTTGCGTTTACTAACGAAGCACCTCGCTAAAAAAAAAAAAAA |
| | AAAAAAAAAAA |
| SEQ ID: 657 | ATGGACGACGACGACAAGCTGGTTTCTGACGGTGGTCCGAACCTGTACTAACGAAGCACCTCGCTAAAAAAAAAA |
| | AAAAAAAAAAAAAAA |
| SEQ ID: 658 | ATGGACGACGACGACAAGGTTTCTGACGGTGGTCCGAACCTGTACTAACGAAGCACCTCGCTAAAAAAAAAAAAA |
| | AAAAAAAAAAAA |
| SEQ ID: 659 | ATGGACGACGACGACAAGGCTCTGGCTTCTTGCATGGGTCTGATCTACTAACGAAGCACCTCGCTAAAAAAAAAAA |
| | AAAAAAAAAAAAAA |
| SEQ ID: 660 | ATGGACGACGACGACAAGGGTTCTGAAGAACTGCGTTCTCTGTACTAACGAAGCACCTCGCTAAAAAAAAAAAAA |
| | AAAAAAAAAAAA |
| SEQ ID: 661 | ATGGACGACGACGACAAGTTCCGTGACTACGTTGACCGTTTCTACTAACGAAGCACCTCGCTAAAAAAAAAAAAAA |
| | AAAAAAAAAAA |
| SEQ ID: 662 | ATGGACGACGACGACAAGCAGCGTCCGCTGGTTACCATCAAAATCTAACGAAGCACCTCGCTAAAAAAAAAAAAA |
| | AAAAAAAAAAAA |
| SEQ ID: 663 | ATGGACGACGACGACAAGATCTCTGAACGTATCCTGTCTACCTACTAACGAAGCACCTCGCTAAAAAAAAAAAAAA |
| | AAAAAAAAAAA |
| SEQ ID: 664 | ATGGACGACGACGACAAGCGTCGTGGTTGGGAAGTTCTGAAATACTAACGAAGCACCTCGCTAAAAAAAAAAAAA |
| | AAAAAAAAAAAA |
| SEQ ID: 665 | ATGGACGACGACGACAAGATGGCTCTGTGGATGCGTCTGCTGCCGCTGTAACGAAGCACCTCGCTAAAAAAAAAA |
| | AAAAAAAAAAAAAAA |
| SEQ ID: 666 | ATGGACGACGACGACAAGTGGATGCGTCTGCTGCCGCTGCTGGCTCTGTAACGAAGCACCTCGCTAAAAAAAAAA |
| | AAAAAAAAAAAAAAA |
| SEQ ID: 667 | ATGGACGACGACGACAAGTGGATGCGTCTGCTGCCGCTGCTGTAACGAAGCACCTCGCTAAAAAAAAAAAAAAAA |
| | AAAAAAAAA |
| SEQ ID: 668 | ATGGACGACGACGACAAGCTGTGGATGCGTCTGCTGCCGCTGTAACGAAGCACCTCGCTAAAAAAAAAAAAAAAA |
| | AAAAAAAAA |
| SEQ ID: 669 | ATGGACGACGACGACAAGTCTCTGCAGAAACGTGGTATCGTTTAACGAAGCACCTCGCTAAAAAAAAAAAAAAAA |
| | AAAAAAAAA |
| SEQ ID: 670 | ATGGACGACGACGACAAGATGGCTCTGTGGATGCGTCTGCTGTAACGAAGCACCTCGCTAAAAAAAAAAAAAAAA |
| | AAAAAAAAA |
| SEQ ID: 671 | ATGGACGACGACGACAAGATGATGATCGCTCGTTTCAAAATGTAACGAAGCACCTCGCTAAAAAAAAAAAAAAAA |
| | AAAAAAAAA |
| SEQ ID: 672 | ATGGACGACGACGACAAGATGATGATCGCTCGTTTCAAAATGTTCTAACGAAGCACCTCGCTAAAAAAAAAAAAAA |
| | AAAAAAAAAAA |
| SEQ ID: 673 | ATGGACGACGACGACAAGATGTCTCGTAAACACAAATGGAAACTGTAACGAAGCACCTCGCTAAAAAAAAAAAAA |
| | AAAAAAAAAAAA |
| SEQ ID: 674 | ATGGACGACGACGACAAGCTGATGTCTCGTAAACACAAATGGAAACTGTAACGAAGCACCTCGCTAAAAAAAAAA |
| | AAAAAAAAAAAAAAA |
| SEQ ID: 675 | ATGGACGACGACGACAAGTCTCTGAAAAAAGGTGCTGCTGCTCTGTAACGAAGCACCTCGCTAAAAAAAAAAAAA |
| | AAAAAAAAAAAA |
| SEQ ID: 676 | ATGGACGACGACGACAAGTTCTCTCTGAAAAAAGGTGCTGCTGCTCTGTAACGAAGCACCTCGCTAAAAAAAAAAA |
| | AAAAAAAAAAAAAA |
| SEQ ID: 677 | ATGGACGACGACGACAAGCACCCGCGTTACTTCAACCAGCTGTAACGAAGCACCTCGCTAAAAAAAAAAAAAAAA |
| | AAAAAAAAA |
| SEQ ID: 678 | ATGGACGACGACGACAAGCTGATGCACTGCCAGACCACCCTGTAACGAAGCACCTCGCTAAAAAAAAAAAAAAAA |
| | AAAAAAAAA |
| SEQ ID: 679 | ATGGACGACGACGACAAGGCTATGATGATCGCTCGTTTCAAAATGTTCTAACGAAGCACCTCGCTAAAAAAAAAAA |
| | AAAAAAAAAAAAAA |
| SEQ ID: 680 | ATGGACGACGACGACAAGATGTCTCGTCTGTCTAAAGTTGCTCCGGTTTAACGAAGCACCTCGCTAAAAAAAAAAA |
| | AAAAAAAAAAAAAA |
| SEQ ID: 681 | ATGGACGACGACGACAAGATGGCTGCTCTGCCGCGTCTGATCGGTTTCTAACGAAGCACCTCGCTAAAAAAAAAAA |
| | AAAAAAAAAAAAAA |
| SEQ ID: 682 | ATGGACGACGACGACAAGATGATCGCTCGTTTCAAAATGTTCTAACGAAGCACCTCGCTAAAAAAAAAAAAAAAAA |
| | AAAAAAAA |
| SEQ ID: 683 | ATGGACGACGACGACAAGACCCTGAAAAAAATGCGTGAAATCTAACGAAGCACCTCGCTAAAAAAAAAAAAAAAA |
| | AAAAAAAAA |
| SEQ ID: 684 | ATGGACGACGACGACAAGGAAGCTAAACAGAAAGGTTTCGTTCCGTTCTAACGAAGCACCTCGCTAAAAAAAAAA |
| | AAAAAAAAAAAAAAA |
| SEQ ID: 685 | ATGGACGACGACGACAAGCGTATGATGGAATACGGTACCACCATGTAACGAAGCACCTCGCTAAAAAAAAAAAAA |
| | AAAAAAAAAAAA |
| SEQ ID: 686 | ATGGACGACGACGACAAGGAAGTTAAAGAAAAAGGTATGGCTGCTCTGTAACGAAGCACCTCGCTAAAAAAAAAA |
| | AAAAAAAAAAAAAAA |
| SEQ ID: 687 | ATGGACGACGACGACAAGGAAGTTAAAGAAAAAGGTATGGCTGCTTAACGAAGCACCTCGCTAAAAAAAAAAAAA |
| | AAAAAAAAAAAA |
| SEQ ID: 688 | ATGGACGACGACGACAAGTACGCTATGATGATCGCTCGTTTCAAAATGTAACGAAGCACCTCGCTAAAAAAAAAAA |
| | AAAAAAAAAAAAAA |
| SEQ ID: 689 | ATGGACGACGACGACAAGAACCCGCACAAAATGATGGGTGTTCCGCTGTAACGAAGCACCTCGCTAAAAAAAAAA |
| | AAAAAAAAAAAAAAA |
| SEQ ID: 690 | ATGGACGACGACGACAAGTCTCGTAAACACAAATGGAAACTGTAACGAAGCACCTCGCTAAAAAAAAAAAAAAAA |
| | AAAAAAAAA |
| SEQ ID: 691 | ATGGACGACGACGACAAGTTCCAGCAGGACAAACACTACGACCTGTAACGAAGCACCTCGCTAAAAAAAAAAAAA |
| | AAAAAAAAAAAA |
| SEQ ID: 692 | ATGGACGACGACGACAAGTACGCTTTCCTGCACGCTACCGACCTGTAACGAAGCACCTCGCTAAAAAAAAAAAAAA |
| | AAAAAAAAAAA |
| SEQ ID: 693 | ATGGACGACGACGACAAGTTCTCTCTGAAAAAAGGTGCTGCTGCTTAACGAAGCACCTCGCTAAAAAAAAAAAAAA |
| | AAAAAAAAAAA |
| SEQ ID: 694 | ATGGACGACGACGACAAGTCTCTGAAAAAAGGTGCTGCTGCTTAACGAAGCACCTCGCTAAAAAAAAAAAAAAAA |
| | AAAAAAAAA |
| SEQ ID: 695 | ATGGACGACGACGACAAGACCCTGAAAAAAATGCGTGAAATCATCTAACGAAGCACCTCGCTAAAAAAAAAAAAA |
| | AAAAAAAAAAAA |
| SEQ ID: 696 | ATGGACGACGACGACAAGGAACGTATGTCTCGTCTGTCTAAAGTTTAACGAAGCACCTCGCTAAAAAAAAAAAAAA |
| | AAAAAAAAAAA |
| SEQ ID: 697 | ATGGACGACGACGACAAGTACGCTAAATGGAAACTGTGCTCTGCTTAACGAAGCACCTCGCTAAAAAAAAAAAAA |
| | AAAAAAAAAAAA |
| SEQ ID: 698 | ATGGACGACGACGACAAGGCTGCTAAAATGTACGCTTTCACCCTGTAACGAAGCACCTCGCTAAAAAAAAAAAAAA |
| | AAAAAAAAAAA |
| SEQ ID: 699 | ATGGACGACGACGACAAGTGCCCGCGTGAACGTCCGGAAGAACTGTAACGAAGCACCTCGCTAAAAAAAAAAAAA |
| | AAAAAAAAAAAA |
| SEQ ID: 700 | ATGGACGACGACGACAAGTACGCTTACGCTAAATGGAAACTGTAACGAAGCACCTCGCTAAAAAAAAAAAAAAAA |
| | AAAAAAAAA |
| SEQ ID: 701 | ATGGACGACGACGACAAGTTCCTGCTGTCTCTGTTCTCTCTGTAACGAAGCACCTCGCTAAAAAAAAAAAAAAAAA |
| | AAAAAAAA |
| SEQ ID: 702 | ATGGACGACGACGACAAGTCTGTTCGTGCTGCTTTCGTTCACGCTCTGTAACGAAGCACCTCGCTAAAAAAAAAAA |
| | AAAAAAAAAAAAAA |
| SEQ ID: 703 | ATGGACGACGACGACAAGAACGCTTCTGTTCGTGCTGCTTTCTAACGAAGCACCTCGCTAAAAAAAAAAAAAAAAA |
| | AAAAAAAA |
| SEQ ID: 704 | ATGGACGACGACGACAAGCACTCTCTGCACATCTGGTCTCTGTAACGAAGCACCTCGCTAAAAAAAAAAAAAAAAA |
| | AAAAAAAA |
| SEQ ID: 705 | ATGGACGACGACGACAAGGAAGTTCTGAAACGTGAACCGCTGTAACGAAGCACCTCGCTAAAAAAAAAAAAAAAA |
| | AAAAAAAAA |
| SEQ ID: 706 | ATGGACGACGACGACAAGCTGAACCACCTGAAAGCTACCCCGATCTAACGAAGCACCTCGCTAAAAAAAAAAAAA |
| | AAAAAAAAAAAA |
| SEQ ID: 707 | ATGGACGACGACGACAAGATCCTGAAACTGCAGGTTTTCCTGTAACGAAGCACCTCGCTAAAAAAAAAAAAAAAAA |
| | AAAAAAAA |
| SEQ ID: 708 | ATGGACGACGACGACAAGATGGGTATCCTGAAACTGCAGGTTTTCTAACGAAGCACCTCGCTAAAAAAAAAAAAA |
| | AAAAAAAAAAAA |
| SEQ ID: 709 | ATGGACGACGACGACAAGATGGGTATCCTGAAACTGCAGGTTTTCCTGTAACGAAGCACCTCGCTAAAAAAAAAAA |
| | AAAAAAAAAAAAAA |
| SEQ ID: 710 | ATGGACGACGACGACAAGAACACCTACGGTAAACGTAACGCTGTTTAACGAAGCACCTCGCTAAAAAAAAAAAAA |
| | AAAAAAAAAAAA |
| SEQ ID: 711 | ATGGACGACGACGACAAGTTCCTGCACCGTAACGGTGTTCTGTAACGAAGCACCTCGCTAAAAAAAAAAAAAAAA |
| | AAAAAAAAA |
| SEQ ID: 712 | ATGGACGACGACGACAAGTACCTGAAAACCAACCTGTTCCTGTAACGAAGCACCTCGCTAAAAAAAAAAAAAAAAA |
| | AAAAAAAA |
| SEQ ID: 713 | ATGGACGACGACGACAAGAACCTGATCTTCAAATGGATCCTGTAACGAAGCACCTCGCTAAAAAAAAAAAAAAAA |
| | AAAAAAAAA |
| SEQ ID: 714 | ATGGACGACGACGACAAGTACGTTATGGTTACCGCTGCTCTGTAACGAAGCACCTCGCTAAAAAAAAAAAAAAAAA |
| | AAAAAAAA |
| SEQ ID: 715 | ATGGACGACGACGACAAGACCCTGTCTTTCCGTCTGCTGTGCGCTCTGTAACGAAGCACCTCGCTAAAAAAAAAAA |
| | AAAAAAAAAAAAAA |
| SEQ ID: 716 | ATGGACGACGACGACAAGTACCTGAAAACCAACCTGTTCCTGTTCCTGTAACGAAGCACCTCGCTAAAAAAAAAAA |
| | AAAAAAAAAAAAAA |
| SEQ ID: 717 | ATGGACGACGACGACAAGTACCTGAAAACCAACCTGTTCCTGTTCTAACGAAGCACCTCGCTAAAAAAAAAAAAAA |
| | AAAAAAAAAAA |
| SEQ ID: 718 | ATGGACGACGACGACAAGTCTTTCCGTCTGCTGTGCGCTCTGTAACGAAGCACCTCGCTAAAAAAAAAAAAAAAAA |
| | AAAAAAAA |
| SEQ ID: 719 | ATGGACGACGACGACAAGACCCTGCACCGTCTGACCTGGTCTTTCTAACGAAGCACCTCGCTAAAAAAAAAAAAAA |
| | AAAAAAAAAAA |
| SEQ ID: 720 | ATGGACGACGACGACAAGTGCGGTATGGACAAATTCTCTATCACCCTGTAACGAAGCACCTCGCTAAAAAAAAAAA |
| | AAAAAAAAAAAAAA |
| SEQ ID: 721 | ATGGACGACGACGACAAGTGCGGTATGGACAAATTCTCTATCTAACGAAGCACCTCGCTAAAAAAAAAAAAAAAA |
| | AAAAAAAAA |
| SEQ ID: 722 | ATGGACGACGACGACAAGAACCTGATCTTCAAATGGAAATCTATCTAACGAAGCACCTCGCTAAAAAAAAAAAAAA |
| | AAAAAAAAAAA |
| SEQ ID: 723 | ATGGACGACGACGACAAGTGGCCGTGCAACGGTCGTATCCTGTGCCTGTAACGAAGCACCTCGCTAAAAAAAAAA |
| | AAAAAAAAAAAAAAA |
| SEQ ID: 724 | ATGGACGACGACGACAAGGTTCTGCTGGAAAAAAAATCTCCGCTGTAACGAAGCACCTCGCTAAAAAAAAAAAAA |
| | AAAAAAAAAAAA |
| SEQ ID: 725 | ATGGACGACGACGACAAGTTCCTGGTTCGTTCTTTCTACCTGTAACGAAGCACCTCGCTAAAAAAAAAAAAAAAAA |
| | AAAAAAAA |
| SEQ ID: 726 | ATGGACGACGACGACAAGCACCTGCGTAACCGTGACCGTCTGTAACGAAGCACCTCGCTAAAAAAAAAAAAAAAA |
| | AAAAAAAAA |
| SEQ ID: 727 | ATGGACGACGACGACAAGTCTCCGATGCGTTCTGTTCTGCTGTAACGAAGCACCTCGCTAAAAAAAAAAAAAAAAA |
| | AAAAAAAA |
| SEQ ID: 728 | ATGGACGACGACGACAAGGCTGCTCTGCAGCGTCTGGCTGCTGTTTAACGAAGCACCTCGCTAAAAAAAAAAAAA |
| | AAAAAAAAAAAA |
| SEQ ID: 729 | ATGGACGACGACGACAAGCTGCCGGCTCGTACCTCTCCGATGTAACGAAGCACCTCGCTAAAAAAAAAAAAAAAA |
| | AAAAAAAAA |
| SEQ ID: 730 | ATGGACGACGACGACAAGCTGCTGGAAAAAAAATCTCCGCTGTAACGAAGCACCTCGCTAAAAAAAAAAAAAAAA |
| | AAAAAAAAA |
| SEQ ID: 731 | ATGGACGACGACGACAAGGACAAAGAACGTCTGGCTGCTCTGTAACGAAGCACCTCGCTAAAAAAAAAAAAAAAA |
| | AAAAAAAAA |
| SEQ ID: 732 | ATGGACGACGACGACAAGCACGCTCGTATCAAACTGAAAGTTTAACGAAGCACCTCGCTAAAAAAAAAAAAAAAA |
| | AAAAAAAAA |
| SEQ ID: 733 | ATGGACGACGACGACAAGTACCGTGGTCGTTCTTGCCCGATCTAACGAAGCACCTCGCTAAAAAAAAAAAAAAAAA |
| | AAAAAAAA |
| SEQ ID: 734 | ATGGACGACGACGACAAGCAGCAGGACAAAGAACGTCTGGCTGCTCTGTAACGAAGCACCTCGCTAAAAAAAAAA |
| | AAAAAAAAAAAAAAA |
| SEQ ID: 735 | ATGGACGACGACGACAAGGAACTGCCGGCTCGTACCTCTCCGATGTAACGAAGCACCTCGCTAAAAAAAAAAAAA |
| | AAAAAAAAAAAA |
| SEQ ID: 736 | ATGGACGACGACGACAAGTGCTACCGTGGTCGTTCTTGCCCGATCTAACGAAGCACCTCGCTAAAAAAAAAAAAAA |
| | AAAAAAAAAAA |
| SEQ ID: 737 | ATGGACGACGACGACAAGCGTCCGCGTGACCGTTCTGGTCTGTAACGAAGCACCTCGCTAAAAAAAAAAAAAAAA |
| | AAAAAAAAA |
| SEQ ID: 738 | ATGGACGACGACGACAAGTCTCCGATGCGTTCTGTTCTGCTGACCCTGTAACGAAGCACCTCGCTAAAAAAAAAAA |
| | AAAAAAAAAAAAAA |
| SEQ ID: 739 | ATGGACGACGACGACAAGGCTCTGCAGCGTCTGGCTGCTGTTTAACGAAGCACCTCGCTAAAAAAAAAAAAAAAA |
| | AAAAAAAAA |
| SEQ ID: 740 | ATGGACGACGACGACAAGGCTGCTCTGCAGCGTCTGGCTGCTGTTCTGTAACGAAGCACCTCGCTAAAAAAAAAAA |
| | AAAAAAAAAAAAAA |
| SEQ ID: 741 | ATGGACGACGACGACAAGCACCTGCGTAACCGTGACCGTCTGGCTTAACGAAGCACCTCGCTAAAAAAAAAAAAA |
| | AAAAAAAAAAAA |
| SEQ ID: 742 | ATGGACGACGACGACAAGCTGGCTAAAGAATGGCAGGCTCTGTAACGAAGCACCTCGCTAAAAAAAAAAAAAAAA |
| | AAAAAAAAA |
| SEQ ID: 743 | ATGGACGACGACGACAAGCAGGACAAAGAACGTCTGGCTGCTCTGTAACGAAGCACCTCGCTAAAAAAAAAAAAA |
| | AAAAAAAAAAAA |
| SEQ ID: 744 | ATGGACGACGACGACAAGAACCTGCAGATCCGTGAAACCTCTCTGTAACGAAGCACCTCGCTAAAAAAAAAAAAA |
| | AAAAAAAAAAAA |
| SEQ ID: 745 | ATGGACGACGACGACAAGCTGCTGAACGTTAAACTGGCTCTGTAACGAAGCACCTCGCTAAAAAAAAAAAAAAAA |
| | AAAAAAAAA |
| SEQ ID: 746 | ATGGACGACGACGACAAGGAACTGCGTCTGCGTCTGGACCAGCTGTAACGAAGCACCTCGCTAAAAAAAAAAAAA |
| | AAAAAAAAAAAA |
| SEQ ID: 747 | ATGGACGACGACGACAAGATGGAACGTCGTCGTATCACCTCTGCTTAACGAAGCACCTCGCTAAAAAAAAAAAAAA |
| | AAAAAAAAAAA |
| SEQ ID: 748 | ATGGACGACGACGACAAGTGGTACCGTTCTAAATTCGCTGACCTGTAACGAAGCACCTCGCTAAAAAAAAAAAAAA |
| | AAAAAAAAAAA |
| SEQ ID: 749 | ATGGACGACGACGACAAGCACCTGAAACGTAACATCGTTGTTTAACGAAGCACCTCGCTAAAAAAAAAAAAAAAA |
| | AAAAAAAAA |
| SEQ ID: 750 | ATGGACGACGACGACAAGTACCGTCGTCAGCTGCAGTCTCTGTAACGAAGCACCTCGCTAAAAAAAAAAAAAAAA |
| | AAAAAAAAA |
| SEQ ID: 751 | ATGGACGACGACGACAAGTACCGTTCTAAATTCGCTGACCTGTAACGAAGCACCTCGCTAAAAAAAAAAAAAAAAA |
| | AAAAAAAA |
| SEQ ID: 752 | ATGGACGACGACGACAAGTCTAACCTGCAGATCCGTGAAACCTCTCTGTAACGAAGCACCTCGCTAAAAAAAAAAA |
| | AAAAAAAAAAAAAA |
| SEQ ID: 753 | ATGGACGACGACGACAAGGAACTGCGTGAACTGCGTCTGCGTCTGTAACGAAGCACCTCGCTAAAAAAAAAAAAA |
| | AAAAAAAAAAAA |
| SEQ ID: 754 | ATGGACGACGACGACAAGGACTACCGTCGTCAGCTGCAGTCTCTGTAACGAAGCACCTCGCTAAAAAAAAAAAAA |
| | AAAAAAAAAAAA |
| SEQ ID: 755 | ATGGACGACGACGACAAGTCTGCTGCTCGTCGTTCTTACGTTTAACGAAGCACCTCGCTAAAAAAAAAAAAAAAAA |
| | AAAAAAAA |
| SEQ ID: 756 | ATGGACGACGACGACAAGGAAGGTCACCTGAAACGTAACATCGTTTAACGAAGCACCTCGCTAAAAAAAAAAAAA |
| | AAAAAAAAAAAA |
| SEQ ID: 757 | ATGGACGACGACGACAAGATGGAACGTCGTCGTATCACCTCTGCTGCTTAACGAAGCACCTCGCTAAAAAAAAAAA |
| | AAAAAAAAAAAAAA |
| SEQ ID: 758 | ATGGACGACGACGACAAGCTGCGTCTGCGTCTGGACCAGCTGTAACGAAGCACCTCGCTAAAAAAAAAAAAAAAA |
| | AAAAAAAAA |
| SEQ ID: 759 | ATGGACGACGACGACAAGGACCTGGAACGTAAAATCGAATCTCTGTAACGAAGCACCTCGCTAAAAAAAAAAAAA |
| | AAAAAAAAAAAA |
| SEQ ID: 760 | ATGGACGACGACGACAAGCTGCAGATCCGTGAAACCTCTCTGTAACGAAGCACCTCGCTAAAAAAAAAAAAAAAA |
| | AAAAAAAAA |
| SEQ ID: 761 | ATGGACGACGACGACAAGCGTGAACTGCGTCTGCGTCTGGACCAGCTGTAACGAAGCACCTCGCTAAAAAAAAAA |
| | AAAAAAAAAAAAAAA |
| SEQ ID: 762 | ATGGACGACGACGACAAGCTGGCTCGTATGCCGCCGCCGCTGTAACGAAGCACCTCGCTAAAAAAAAAAAAAAAA |
| | AAAAAAAAA |
| SEQ ID: 763 | ATGGACGACGACGACAAGGAAATCCGTACCCAGTACGAAGCTATGTAACGAAGCACCTCGCTAAAAAAAAAAAAA |
| | AAAAAAAAAAAA |
| SEQ ID: 764 | ATGGACGACGACGACAAGGGTCCGGGTACCCGTCTGTCTCTGTAACGAAGCACCTCGCTAAAAAAAAAAAAAAAA |
| | AAAAAAAAA |
| SEQ ID: 765 | ATGGACGACGACGACAAGGCTGACCGTGGTCTGCTGCGTGACATCTAACGAAGCACCTCGCTAAAAAAAAAAAAA |
| | AAAAAAAAAAAA |
| SEQ ID: 766 | ATGGACGACGACGACAAGGCTCTGAAATGCAAAGGTTTCCACGTTTAACGAAGCACCTCGCTAAAAAAAAAAAAA |
| | AAAAAAAAAAAA |
| SEQ ID: 767 | ATGGACGACGACGACAAGGAACTGCGTTCTCGTTACTGGGCTATCTAACGAAGCACCTCGCTAAAAAAAAAAAAAA |
| | AAAAAAAAAAA |
| SEQ ID: 768 | ATGGACGACGACGACAAGATCCTGAAAGGTAAATTCCAGACCGCTTAACGAAGCACCTCGCTAAAAAAAAAAAAA |
| | AAAAAAAAAAAA |
| SEQ ID: 769 | ATGGACGACGACGACAAGCGTCCGATCATCCGTCCGGCTACCCTGTAACGAAGCACCTCGCTAAAAAAAAAAAAAA |
| | AAAAAAAAAAA |
| SEQ ID: 770 | ATGGACGACGACGACAAGGAACTGCGTTCTCTGTACAACACCGTTTAACGAAGCACCTCGCTAAAAAAAAAAAAAA |
| | AAAAAAAAAAA |
| SEQ ID: 771 | ATGGACGACGACGACAAGGAAATCTACAAACGTTGGATCATCTAACGAAGCACCTCGCTAAAAAAAAAAAAAAAA |
| | AAAAAAAAA |
| SEQ ID: 772 | ATGGACGACGACGACAAGCGTGTTAAAGAAAAATACCAGCACCTGTAACGAAGCACCTCGCTAAAAAAAAAAAAA |
| | AAAAAAAAAAAA |
| SEQ ID: 773 | ATGGACGACGACGACAAGTACCTGAAAGACCAGCAGCTGCTGTAACGAAGCACCTCGCTAAAAAAAAAAAAAAAA |
| | AAAAAAAAA |
| SEQ ID: 774 | ATGGACGACGACGACAAGTGGCCGACCGTTCGTGAACGTATGTAACGAAGCACCTCGCTAAAAAAAAAAAAAAAA |
| | AAAAAAAAA |
| SEQ ID: 775 | ATGGACGACGACGACAAGTTCCTGAAAGAAAAAGGTGGTCTGTAACGAAGCACCTCGCTAAAAAAAAAAAAAAAA |
| | AAAAAAAAA |
| SEQ ID: 776 | ATGGACGACGACGACAAGGGTCCGAAAGTTAAACAGTGGCCGCTGTAACGAAGCACCTCGCTAAAAAAAAAAAAA |
| | AAAAAAAAAAAA |
| SEQ ID: 777 | ATGGACGACGACGACAAGTTCCTGCGTGGTCGTGCTTACGGTCTGTAACGAAGCACCTCGCTAAAAAAAAAAAAAA |
| | AAAAAAAAAAA |
| SEQ ID: 778 | ATGGACGACGACGACAAGCGTGCTAAATTCAAACAGCTGCTGTAACGAAGCACCTCGCTAAAAAAAAAAAAAAAA |
| | AAAAAAAAA |
| SEQ ID: 779 | ATGGACGACGACGACAAGCAGGCTAAATG |
| | AAAAAAAAAAAA |
| SEQ ID: 780 | ATGGACGACGACGACAAGTGCCCGCTGTCTAAAATCCTGCTGTAACGAAGCACCTCGCTAAAAAAAAAAAAAAAAA |
| | AAAAAAAA |
| SEQ ID: 781 | ATGGACGACGACGACAAGtggtccgtcacgcaatAAAAAAAAAAAAAAAAAAAAAAA*A*A |
| SEQ ID: 782 | ATGGACGACGACGACAAGaggtgattgtgggataAAAAAAAAAAAAAAAAAAAAAAA*A*A |
| SEQ ID: 783 | ATGGACGACGACGACAAGagcggcgttgatacttAAAAAAAAAAAAAAAAAAAAAAA*A*A |
| SEQ ID: 784 | ATGGACGACGACGACAAGtaggtcgcgcttgcttAAAAAAAAAAAAAAAAAAAAAAA*A*A |
| SEQ ID: 785 | ATGGACGACGACGACAAGtgttgcaggttgctgtAAAAAAAAAAAAAAAAAAAAAAA*A*A |
| SEQ ID: 786 | ATGGACGACGACGACAAGgatgtgagttatgcagAAAAAAAAAAAAAAAAAAAAAAA*A*A |
| SEQ ID: 787 | ATGGACGACGACGACAAGaggtatcgcagtctggAAAAAAAAAAAAAAAAAAAAAAA*A*A |
| SEQ ID: 788 | ATGGACGACGACGACAAGtataatgggcgtctctAAAAAAAAAAAAAAAAAAAAAAA*A*A |
| SEQ ID: 789 | ATGGACGACGACGACAAGttcggcctggtgtaacAAAAAAAAAAAAAAAAAAAAAAA*A*A |
| SEQ ID: 790 | ATGGACGACGACGACAAGcctacgtatcgaagttAAAAAAAAAAAAAAAAAAAAAAA*A*A |
| SEQ ID: 791 | ATGGACGACGACGACAAGtctgccttgtatccgcAAAAAAAAAAAAAAAAAAAAAAA*A*A |
| SEQ ID: 792 | ATGGACGACGACGACAAGtgttgaccttcctcttAAAAAAAAAAAAAAAAAAAAAAA*A*A |
| SEQ ID: 793 | ATGGACGACGACGACAAGcctcatgcagtattgaAAAAAAAAAAAAAAAAAAAAAAA*A*A |
| SEQ ID: 794 | ATGGACGACGACGACAAGagtcatccacgcactcAAAAAAAAAAAAAAAAAAAAAAA*A*A |
| SEQ ID: 795 | ATGGACGACGACGACAAGaggttgtcgaattcccAAAAAAAAAAAAAAAAAAAAAAA*A*A |
| SEQ ID: 796 | ATGGACGACGACGACAAGtgcagaaaggtcatctAAAAAAAAAAAAAAAAAAAAAAA*A*A |
| SEQ ID: 797 | ATGGACGACGACGACAAGatttccggatcaatgcAAAAAAAAAAAAAAAAAAAAAAA*A*A |
| SEQ ID: 798 | ATGGACGACGACGACAAGgaatccgtactgattgAAAAAAAAAAAAAAAAAAAAAAA*A*A |
| SEQ ID: 799 | ATGGACGACGACGACAAGagagcgcagacattgcAAAAAAAAAAAAAAAAAAAAAAA*A*A |
| SEQ ID: 800 | ATGGACGACGACGACAAGtgtatgtctaccgagaAAAAAAAAAAAAAAAAAAAAAAA*A*A |
| SEQ ID: 801 | ATGGACGACGACGACAAGtgcttcctacgttcgtAAAAAAAAAAAAAAAAAAAAAAA*A*A |
| SEQ ID: 802 | ATGGACGACGACGACAAGtagtggggtaaaccatAAAAAAAAAAAAAAAAAAAAAAA*A*A |
| SEQ ID: 803 | ATGGACGACGACGACAAGcaaattttccatggcgAAAAAAAAAAAAAAAAAAAAAAA*A*A |
| SEQ ID: 804 | ATGGACGACGACGACAAGaaggccttcgtttcgaAAAAAAAAAAAAAAAAAAAAAAA*A*A |
| SEQ ID: 805 | ATGGACGACGACGACAAGgtcgagggagatatgcAAAAAAAAAAAAAAAAAAAAAAA*A*A |
| SEQ ID: 806 | ATGGACGACGACGACAAGctggacccagacatatAAAAAAAAAAAAAAAAAAAAAAA*A*A |
| SEQ ID: 807 | ATGGACGACGACGACAAGtagtcaagcactcggcAAAAAAAAAAAAAAAAAAAAAAA*A*A |
| SEQ ID: 808 | ATGGACGACGACGACAAGactaaggcggaaatctAAAAAAAAAAAAAAAAAAAAAAA*A*A |
| SEQ ID: 809 | ATGGACGACGACGACAAGtttagtgccggtgataAAAAAAAAAAAAAAAAAAAAAAA*A*A |
| SEQ ID: 810 | ATGGACGACGACGACAAGacttgcaacctaccggAAAAAAAAAAAAAAAAAAAAAAA*A*A |
| SEQ ID: 811 | ATGGACGACGACGACAAGtctacaacggacgtgaAAAAAAAAAAAAAAAAAAAAAAA*A*A |
| SEQ ID: 812 | ATGGACGACGACGACAAGagcaaaaccctacctaAAAAAAAAAAAAAAAAAAAAAAA*A*A |
| SEQ ID: 813 | ATGGACGACGACGACAAGttatcatcggtatgggAAAAAAAAAAAAAAAAAAAAAAA*A*A |
| SEQ ID: 814 | ATGGACGACGACGACAAGttctgcggatcgtcctAAAAAAAAAAAAAAAAAAAAAAA*A*A |
| SEQ ID: 815 | ATGGACGACGACGACAAGcctgcaaaggtatagcAAAAAAAAAAAAAAAAAAAAAAA*A*A |
| SEQ ID: 816 | ATGGACGACGACGACAAGagtactaagaagcgccAAAAAAAAAAAAAAAAAAAAAAA*A*A |
| SEQ ID: 817 | ATGGACGACGACGACAAGttggatacttgctgagAAAAAAAAAAAAAAAAAAAAAAA*A*A |
| SEQ ID: 818 | ATGGACGACGACGACAAGgtgtctccaaatcttcAAAAAAAAAAAAAAAAAAAAAAA*A*A |
| SEQ ID: 819 | ATGGACGACGACGACAAGgactctattacccaccAAAAAAAAAAAAAAAAAAAAAAA*A*A |
| SEQ ID: 820 | ATGGACGACGACGACAAGcagggattccaatatcAAAAAAAAAAAAAAAAAAAAAAA*A*A |
| SEQ ID: 821 | ATGGACGACGACGACAAGtatgcctagacaggttAAAAAAAAAAAAAAAAAAAAAAA*A*A |
| SEQ ID: 822 | ATGGACGACGACGACAAGagtagcattttcggtgAAAAAAAAAAAAAAAAAAAAAAA*A*A |
| SEQ ID: 823 | ATGGACGACGACGACAAGgacgtacgattgctacAAAAAAAAAAAAAAAAAAAAAAA*A*A |
| SEQ ID: 824 | ATGGACGACGACGACAAGgctcatgacatcgctaAAAAAAAAAAAAAAAAAAAAAAA*A*A |
| SEQ ID: 825 | ATGGACGACGACGACAAGgccttcaattctatggAAAAAAAAAAAAAAAAAAAAAAA*A*A |
| SEQ ID: 826 | ATGGACGACGACGACAAGctagtgttacaggtgcAAAAAAAAAAAAAAAAAAAAAAA*A*A |
| SEQ ID: 827 | ATGGACGACGACGACAAGccgagtgctctaaccaAAAAAAAAAAAAAAAAAAAAAAA*A*A |
| SEQ ID: 828 | ATGGACGACGACGACAAGatacgtcgtggcaacgAAAAAAAAAAAAAAAAAAAAAAA*A*A |
| SEQ ID: 829 | ATGGACGACGACGACAAGactgaggtccgatctaAAAAAAAAAAAAAAAAAAAAAAA*A*A |
| SEQ ID: 830 | ATGGACGACGACGACAAGttcgctcggaacatacAAAAAAAAAAAAAAAAAAAAAAA*A*A |
| SEQ ID: 831 | ATGGACGACGACGACAAGcaactcggtagttgagAAAAAAAAAAAAAAAAAAAAAAA*A*A |
| SEQ ID: 832 | ATGGACGACGACGACAAGtttgtttaggggttgcAAAAAAAAAAAAAAAAAAAAAAA*A*A |
| SEQ ID: 833 | ATGGACGACGACGACAAGaagcgcatttcgttctAAAAAAAAAAAAAAAAAAAAAAA*A*A |
| SEQ ID: 834 | ATGGACGACGACGACAAGcgagctccaactatcaAAAAAAAAAAAAAAAAAAAAAAA*A*A |
| SEQ ID: 835 | ATGGACGACGACGACAAGaatctggacggcttgtAAAAAAAAAAAAAAAAAAAAAAA*A*A |
| SEQ ID: 836 | ATGGACGACGACGACAAGcatttatgggtggtcaAAAAAAAAAAAAAAAAAAAAAAA*A*A |
| SEQ ID: 837 | ATGGACGACGACGACAAGattcctgataccagagAAAAAAAAAAAAAAAAAAAAAAA*A*A |
| SEQ ID: 838 | ATGGACGACGACGACAAGtgcaaatgcccaatacAAAAAAAAAAAAAAAAAAAAAAA*A*A |
| SEQ ID: 839 | ATGGACGACGACGACAAGtcattgttgggtaacgAAAAAAAAAAAAAAAAAAAAAAA*A*A |
| SEQ ID: 840 | ATGGACGACGACGACAAGcagtagccacgtgtgaAAAAAAAAAAAAAAAAAAAAAAA*A*A |
| SEQ ID: 841 | ATGGACGACGACGACAAGagaggatgggattactAAAAAAAAAAAAAAAAAAAAAAA*A*A |
| SEQ ID: 842 | ATGGACGACGACGACAAGctataagcgaaaccagAAAAAAAAAAAAAAAAAAAAAAA*A*A |
| SEQ ID: 843 | ATGGACGACGACGACAAGtgacgggctgtagtttAAAAAAAAAAAAAAAAAAAAAAA*A*A |
| SEQ ID: 844 | ATGGACGACGACGACAAGcctgtgtaagacgctgAAAAAAAAAAAAAAAAAAAAAAA*A*A |
| SEQ ID: 845 | ATGGACGACGACGACAAGtatggagacacaaacgAAAAAAAAAAAAAAAAAAAAAAA*A*A |
| SEQ ID: 846 | ATGGACGACGACGACAAGtacgaagggcagcataAAAAAAAAAAAAAAAAAAAAAAA*A*A |
| SEQ ID: 847 | ATGGACGACGACGACAAGggccgatatagcaagtAAAAAAAAAAAAAAAAAAAAAAA*A*A |
| SEQ ID: 848 | ATGGACGACGACGACAAGgagtggtcacacaggtAAAAAAAAAAAAAAAAAAAAAAA*A*A |
| SEQ ID: 849 | ATGGACGACGACGACAAGatatgattcacggtggAAAAAAAAAAAAAAAAAAAAAAA*A*A |
| SEQ ID: 850 | ATGGACGACGACGACAAGtgaccgagaccagagaAAAAAAAAAAAAAAAAAAAAAAA*A*A |
| SEQ ID: 851 | ATGGACGACGACGACAAGgctatcattgagcggaAAAAAAAAAAAAAAAAAAAAAAA*A*A |
| SEQ ID: 852 | ATGGACGACGACGACAAGtagtacgcaggttgatAAAAAAAAAAAAAAAAAAAAAAA*A*A |
| SEQ ID: 853 | ATGGACGACGACGACAAGtggatgtaacgcagcaAAAAAAAAAAAAAAAAAAAAAAA*A*A |
| SEQ ID: 854 | ATGGACGACGACGACAAGtcaactttgagggcacAAAAAAAAAAAAAAAAAAAAAAA*A*A |
| SEQ ID: 855 | ATGGACGACGACGACAAGctgaaaacctttgaggAAAAAAAAAAAAAAAAAAAAAAA*A*A |
| SEQ ID: 856 | ATGGACGACGACGACAAGaaggaaatagagctccAAAAAAAAAAAAAAAAAAAAAAA*A*A |
| SEQ ID: 857 | ATGGACGACGACGACAAGgtaaatcgccctggtaAAAAAAAAAAAAAAAAAAAAAAA*A*A |
| SEQ ID: 858 | ATGGACGACGACGACAAGgccttgtgaagcacgaAAAAAAAAAAAAAAAAAAAAAAA*A*A |
| SEQ ID: 859 | ATGGACGACGACGACAAGctattgaacaccgcagAAAAAAAAAAAAAAAAAAAAAAA*A*A |
| SEQ ID: 860 | ATGGACGACGACGACAAGtagtcccgagaccagaAAAAAAAAAAAAAAAAAAAAAAA*A*A |
| SEQ ID: 861 | ATGGACGACGACGACAAGtaccttcgaaagggccAAAAAAAAAAAAAAAAAAAAAAA*A*A |
| SEQ ID: 862 | ATGGACGACGACGACAAGaggggaaagatgtcagAAAAAAAAAAAAAAAAAAAAAAA*A*A |
| SEQ ID: 863 | ATGGACGACGACGACAAGcacacgagagaacaccAAAAAAAAAAAAAAAAAAAAAAA*A*A |
| SEQ ID: 864 | ATGGACGACGACGACAAGgagaacaaacgtggcgAAAAAAAAAAAAAAAAAAAAAAA*A*A |
| SEQ ID: 865 | ATGGACGACGACGACAAGgaaacaggaaccccacAAAAAAAAAAAAAAAAAAAAAAA*A*A |
| SEQ ID: 866 | ATGGACGACGACGACAAGgtatgggaccaacaacAAAAAAAAAAAAAAAAAAAAAAA*A*A |
| SEQ ID: 867 | ATGGACGACGACGACAAGagccgtgagttctccaAAAAAAAAAAAAAAAAAAAAAAA*A*A |
| SEQ ID: 868 | ATGGACGACGACGACAAGagcacggtagtgatgaAAAAAAAAAAAAAAAAAAAAAAA*A*A |
| SEQ ID: 869 | ATGGACGACGACGACAAGctcggcaatgaactgcAAAAAAAAAAAAAAAAAAAAAAA*A*A |
| SEQ ID: 870 | ATGGACGACGACGACAAGttcacggggagctacaAAAAAAAAAAAAAAAAAAAAAAA*A*A |
| SEQ ID: 871 | ATGGACGACGACGACAAGcccggaatattccctaAAAAAAAAAAAAAAAAAAAAAAA*A*A |
| SEQ ID: 872 | ATGGACGACGACGACAAGgcatcgtttccaacggAAAAAAAAAAAAAAAAAAAAAAA*A*A |
| SEQ ID: 873 | ATGGACGACGACGACAAGaaagtaagccaaccgcAAAAAAAAAAAAAAAAAAAAAAA*A*A |
| SEQ ID: 874 | ATGGACGACGACGACAAGagcctagcttaatgcgAAAAAAAAAAAAAAAAAAAAAAA*A*A |
| SEQ ID: 875 | ATGGACGACGACGACAAGgttaccctgcttcgagAAAAAAAAAAAAAAAAAAAAAAA*A*A |
| SEQ ID: 876 | ATGGACGACGACGACAAGgagtgaaagtcaccccAAAAAAAAAAAAAAAAAAAAAAA*A*A |
| SEQ ID: 877 | ATGGACGACGACGACAAGctagtctatttgcgacAAAAAAAAAAAAAAAAAAAAAAA*A*A |
| SEQ ID: 878 | ATGGACGACGACGACAAGgttgggtaaacgcagcAAAAAAAAAAAAAAAAAAAAAAA*A*A |
| SEQ ID: 879 | ATGGACGACGACGACAAGtggaactgtatagctgAAAAAAAAAAAAAAAAAAAAAAA*A*A |
| SEQ ID: 880 | ATGGACGACGACGACAAGctgacagttcacccgtAAAAAAAAAAAAAAAAAAAAAAA*A*A |
| SEQ ID: 881 | ATGGACGACGACGACAAGtcaactggcatgtgtaAAAAAAAAAAAAAAAAAAAAAAA*A*A |
| SEQ ID: 882 | ATGGACGACGACGACAAGcctactggtactacgcAAAAAAAAAAAAAAAAAAAAAAA*A*A |
| SEQ ID: 883 | ATGGACGACGACGACAAGactaggtgctcagttcAAAAAAAAAAAAAAAAAAAAAAA*A*A |
| SEQ ID: 884 | ATGGACGACGACGACAAGaagcgtgttgctgcagAAAAAAAAAAAAAAAAAAAAAAA*A*A |
| SEQ ID: 885 | ATGGACGACGACGACAAGcagctgagatcaggtcAAAAAAAAAAAAAAAAAAAAAAA*A*A |
| SEQ ID: 886 | ATGGACGACGACGACAAGgcactgcttatagaagAAAAAAAAAAAAAAAAAAAAAAA*A*A |
| SEQ ID: 887 | ATGGACGACGACGACAAGtgatgtacgattggagAAAAAAAAAAAAAAAAAAAAAAA*A*A |
| SEQ ID: 888 | ATGGACGACGACGACAAGttcagtggacatcctcAAAAAAAAAAAAAAAAAAAAAAA*A*A |
| SEQ ID: 889 | ATGGACGACGACGACAAGgttttaggtagggaagAAAAAAAAAAAAAAAAAAAAAAA*A*A |
| SEQ ID: 890 | ATGGACGACGACGACAAGtgtgacaagcatgagtAAAAAAAAAAAAAAAAAAAAAAA*A*A |
| SEQ ID: 891 | ATGGACGACGACGACAAGggattcccctaagcagAAAAAAAAAAAAAAAAAAAAAAA*A*A |
| SEQ ID: 892 | ATGGACGACGACGACAAGcagcctatcgaccaagAAAAAAAAAAAAAAAAAAAAAAA*A*A |
| SEQ ID: 893 | ATGGACGACGACGACAAGtatcggtagtccctctAAAAAAAAAAAAAAAAAAAAAAA*A*A |
| SEQ ID: 894 | ATGGACGACGACGACAAGttacgcgttcagacggAAAAAAAAAAAAAAAAAAAAAAA*A*A |
| SEQ ID: 895 | ATGGACGACGACGACAAGatgaggtagctccaccAAAAAAAAAAAAAAAAAAAAAAA*A*A |
| SEQ ID: 896 | ATGGACGACGACGACAAGggggagtgtgtgtataAAAAAAAAAAAAAAAAAAAAAAA*A*A |
| SEQ ID: 897 | ATGGACGACGACGACAAGgttcgggcttttcgacAAAAAAAAAAAAAAAAAAAAAAA*A*A |
| SEQ ID: 898 | ATGGACGACGACGACAAGtgcgcagaaacctcgaAAAAAAAAAAAAAAAAAAAAAAA*A*A |
| SEQ ID: 899 | ATGGACGACGACGACAAGcggtaccgtttcacgaAAAAAAAAAAAAAAAAAAAAAAA*A*A |
| SEQ ID: 900 | ATGGACGACGACGACAAGccgattgatgaacgtcAAAAAAAAAAAAAAAAAAAAAAA*A*A |
| SEQ ID: 901 | ATGGACGACGACGACAAGatcacctgaggaactaAAAAAAAAAAAAAAAAAAAAAAA*A*A |
| SEQ ID: 902 | ATGGACGACGACGACAAGctcgaattagcgcggaAAAAAAAAAAAAAAAAAAAAAAA*A*A |
| SEQ ID: 903 | ATGGACGACGACGACAAGatacagagacgaccatAAAAAAAAAAAAAAAAAAAAAAA*A*A |
| SEQ ID: 904 | ATGGACGACGACGACAAGggtacactgaaatggtAAAAAAAAAAAAAAAAAAAAAAA*A*A |
| SEQ ID: 905 | ATGGACGACGACGACAAGcaggatgaacctatacAAAAAAAAAAAAAAAAAAAAAAA*A*A |
| SEQ ID: 906 | ATGGACGACGACGACAAGcagatggccgataagaAAAAAAAAAAAAAAAAAAAAAAA*A*A |
| SEQ ID: 907 | ATGGACGACGACGACAAGctagtgagggcgcattAAAAAAAAAAAAAAAAAAAAAAA*A*A |
| SEQ ID: 908 | ATGGACGACGACGACAAGtgatacgactagcgccAAAAAAAAAAAAAAAAAAAAAAA*A*A |
| SEQ ID: 909 | ATGGACGACGACGACAAGgatcacctgcaggctaAAAAAAAAAAAAAAAAAAAAAAA*A*A |
| SEQ ID: 910 | ATGGACGACGACGACAAGgcatgttgccagaagaAAAAAAAAAAAAAAAAAAAAAAA*A*A |
| SEQ ID: 911 | ATGGACGACGACGACAAGgagacgtagtactatgAAAAAAAAAAAAAAAAAAAAAAA*A*A |
| SEQ ID: 912 | ATGGACGACGACGACAAGtccagctcaacaacgtAAAAAAAAAAAAAAAAAAAAAAA*A*A |
| SEQ ID: 913 | ATGGACGACGACGACAAGcagtgcctgagatgacAAAAAAAAAAAAAAAAAAAAAAA*A*A |
| SEQ ID: 914 | ATGGACGACGACGACAAGagcacctctaagtcggAAAAAAAAAAAAAAAAAAAAAAA*A*A |
| SEQ ID: 915 | ATGGACGACGACGACAAGttgcgttagagtgtcgAAAAAAAAAAAAAAAAAAAAAAA*A*A |
| SEQ ID: 916 | ATGGACGACGACGACAAGgtcaaatcgtctgcacAAAAAAAAAAAAAAAAAAAAAAA*A*A |
| SEQ ID: 917 | ATGGACGACGACGACAAGgcaacttgtgcctacaAAAAAAAAAAAAAAAAAAAAAAA*A*A |
| SEQ ID: 918 | ATGGACGACGACGACAAGcgagcaaagtgtccttAAAAAAAAAAAAAAAAAAAAAAA*A*A |
| SEQ ID: 919 | ATGGACGACGACGACAAGcatgaaagacacgacgAAAAAAAAAAAAAAAAAAAAAAA*A*A |
| SEQ ID: 920 | ATGGACGACGACGACAAGaggagtatctcacacaAAAAAAAAAAAAAAAAAAAAAAA*A*A |
| SEQ ID: 921 | ATGGACGACGACGACAAGtcgtgcatacctagagAAAAAAAAAAAAAAAAAAAAAAA*A*A |
| SEQ ID: 922 | ATGGACGACGACGACAAGctcattcccagatcggAAAAAAAAAAAAAAAAAAAAAAA*A*A |
| SEQ ID: 923 | ATGGACGACGACGACAAGtacctagcaaggacggAAAAAAAAAAAAAAAAAAAAAAA*A*A |
| SEQ ID: 924 | ATGGACGACGACGACAAGtacagagtccgctgttAAAAAAAAAAAAAAAAAAAAAAA*A*A |
| SEQ ID: 925 | ATGGACGACGACGACAAGctgttggaatttctggAAAAAAAAAAAAAAAAAAAAAAA*A*A |
| SEQ ID: 926 | ATGGACGACGACGACAAGtaggccgaagtaccacAAAAAAAAAAAAAAAAAAAAAAA*A*A |
| SEQ ID: 927 | ATGGACGACGACGACAAGcacgtaacgagtttgcAAAAAAAAAAAAAAAAAAAAAAA*A*A |
| SEQ ID: 928 | ATGGACGACGACGACAAGggtcctaatctatgtgAAAAAAAAAAAAAAAAAAAAAAA*A*A |
| SEQ ID: 929 | ATGGACGACGACGACAAGgagcgtgcagattaccAAAAAAAAAAAAAAAAAAAAAAA*A*A |
| SEQ ID: 930 | ATGGACGACGACGACAAGtcactcgaacggagacAAAAAAAAAAAAAAAAAAAAAAA*A*A |
| SEQ ID: 931 | ATGGACGACGACGACAAGtgggcaacagagtaggAAAAAAAAAAAAAAAAAAAAAAA*A*A |
| SEQ ID: 932 | ATGGACGACGACGACAAGtgatatggagacaccaAAAAAAAAAAAAAAAAAAAAAAA*A*A |
| SEQ ID: 933 | ATGGACGACGACGACAAGcattgtggcaagactgAAAAAAAAAAAAAAAAAAAAAAA*A*A |
| SEQ ID: 934 | ATGGACGACGACGACAAGttatgactaccgcacaAAAAAAAAAAAAAAAAAAAAAAA*A*A |
| SEQ ID: 935 | ATGGACGACGACGACAAGtatgcggaacgttgtgAAAAAAAAAAAAAAAAAAAAAAA*A*A |
| SEQ ID: 936 | ATGGACGACGACGACAAGccattgcgtcttgtccAAAAAAAAAAAAAAAAAAAAAAA*A*A |
| SEQ ID: 937 | ATGGACGACGACGACAAGtggcgctgcgtataatAAAAAAAAAAAAAAAAAAAAAAA*A*A |
| SEQ ID: 938 | ATGGACGACGACGACAAGtgccttacgacacgtaAAAAAAAAAAAAAAAAAAAAAAA*A*A |
| SEQ ID: 939 | ATGGACGACGACGACAAGgtttgggtaggagggaAAAAAAAAAAAAAAAAAAAAAAA*A*A |
| SEQ ID: 940 | ATGGACGACGACGACAAGgttcgttttcggtgccAAAAAAAAAAAAAAAAAAAAAAA*A*A |
| SEQ ID: 941 | ATGGACGACGACGACAAGatattcgccggcaaatAAAAAAAAAAAAAAAAAAAAAAA*A*A |
| SEQ ID: 942 | ATGGACGACGACGACAAGgggaatcatttgctccAAAAAAAAAAAAAAAAAAAAAAA*A*A |
| SEQ ID: 943 | ATGGACGACGACGACAAGccacggaactcgatgtAAAAAAAAAAAAAAAAAAAAAAA*A*A |
| SEQ ID: 944 | ATGGACGACGACGACAAGgtaatctttgctctcgAAAAAAAAAAAAAAAAAAAAAAA*A*A |
| SEQ ID: 945 | ATGGACGACGACGACAAGaagtgcggtatcgaggAAAAAAAAAAAAAAAAAAAAAAA*A*A |
| SEQ ID: 946 | ATGGACGACGACGACAAGgggctgcaagttcacaAAAAAAAAAAAAAAAAAAAAAAA*A*A |
| SEQ ID: 947 | ATGGACGACGACGACAAGaacccaagcagctatcAAAAAAAAAAAAAAAAAAAAAAA*A*A |
| SEQ ID: 948 | ATGGACGACGACGACAAGgatggagaggttgaatAAAAAAAAAAAAAAAAAAAAAAA*A*A |
| SEQ ID: 949 | ATGGACGACGACGACAAGttagaggttgacggtaAAAAAAAAAAAAAAAAAAAAAAA*A*A |
| SEQ ID: 950 | ATGGACGACGACGACAAGgataatctccgacggcAAAAAAAAAAAAAAAAAAAAAAA*A*A |
| SEQ ID: 951 | ATGGACGACGACGACAAGagattagtgctcccgaAAAAAAAAAAAAAAAAAAAAAAA*A*A |
| SEQ ID: 952 | ATGGACGACGACGACAAGactccagttcttgtacAAAAAAAAAAAAAAAAAAAAAAA*A*A |
| SEQ ID: 953 | ATGGACGACGACGACAAGcaccctactcaaagacAAAAAAAAAAAAAAAAAAAAAAA*A*A |
| SEQ ID: 954 | ATGGACGACGACGACAAGtacctcatacgcgttgAAAAAAAAAAAAAAAAAAAAAAA*A*A |
| SEQ ID: 955 | ATGGACGACGACGACAAGcgaaaatcgggtagatAAAAAAAAAAAAAAAAAAAAAAA*A*A |
| SEQ ID: 956 | ATGGACGACGACGACAAGcgatcgctcctaccatAAAAAAAAAAAAAAAAAAAAAAA*A*A |
| SEQ ID: 957 | ATGGACGACGACGACAAGcccactccatactagaAAAAAAAAAAAAAAAAAAAAAAA*A*A |
| SEQ ID: 958 | ATGGACGACGACGACAAGacggctttacgcaagaAAAAAAAAAAAAAAAAAAAAAAA*A*A |
| SEQ ID: 959 | ATGGACGACGACGACAAGtcgcagaaccatctgcAAAAAAAAAAAAAAAAAAAAAAA*A*A |
| SEQ ID: 960 | ATGGACGACGACGACAAGgagttgctagcctgtaAAAAAAAAAAAAAAAAAAAAAAA*A*A |
| SEQ ID: 961 | ATGGACGACGACGACAAGttaactgcttcagccgAAAAAAAAAAAAAAAAAAAAAAA*A*A |
| SEQ ID: 962 | ATGGACGACGACGACAAGtcgcgatgaccgctatAAAAAAAAAAAAAAAAAAAAAAA*A*A |
| SEQ ID: 963 | ATGGACGACGACGACAAGgacgaacgcgttaccaAAAAAAAAAAAAAAAAAAAAAAA*A*A |
| SEQ ID: 964 | ATGGACGACGACGACAAGcggcaaaactactgtcAAAAAAAAAAAAAAAAAAAAAAA*A*A |
| SEQ ID: 965 | ATGGACGACGACGACAAGcccgactctgatgaagAAAAAAAAAAAAAAAAAAAAAAA*A*A |
| SEQ ID: 966 | ATGGACGACGACGACAAGactgcgctacagagtcAAAAAAAAAAAAAAAAAAAAAAA*A*A |
| SEQ ID: 967 | ATGGACGACGACGACAAGacggtgtaccttagggAAAAAAAAAAAAAAAAAAAAAAA*A*A |
| SEQ ID: 968 | ATGGACGACGACGACAAGtcgagtccgcagtatcAAAAAAAAAAAAAAAAAAAAAAA*A*A |
| SEQ ID: 969 | ATGGACGACGACGACAAGgacgctgcctaattggAAAAAAAAAAAAAAAAAAAAAAA*A*A |
| SEQ ID: 970 | ATGGACGACGACGACAAGtggggatggactagtaAAAAAAAAAAAAAAAAAAAAAAA*A*A |
| SEQ ID: 971 | ATGGACGACGACGACAAGgctctaaaggccacagAAAAAAAAAAAAAAAAAAAAAAA*A*A |
| SEQ ID: 972 | ATGGACGACGACGACAAGcaggagtggtgccttaAAAAAAAAAAAAAAAAAAAAAAA*A*A |
| SEQ ID: 973 | ATGGACGACGACGACAAGccgagaagtgttttgaAAAAAAAAAAAAAAAAAAAAAAA*A*A |
| SEQ ID: 974 | ATGGACGACGACGACAAGtgttcaagccacctagAAAAAAAAAAAAAAAAAAAAAAA*A*A |
| SEQ ID: 975 | ATGGACGACGACGACAAGctcccttgagtgtagcAAAAAAAAAAAAAAAAAAAAAAA*A*A |
| SEQ ID: 976 | ATGGACGACGACGACAAGaatgagcactaccgacAAAAAAAAAAAAAAAAAAAAAAA*A*A |
| SEQ ID: 977 | ATGGACGACGACGACAAGacgcaagtcgcaaagcAAAAAAAAAAAAAAAAAAAAAAA*A*A |
| SEQ ID: 978 | ATGGACGACGACGACAAGattgggagagtcagttAAAAAAAAAAAAAAAAAAAAAAA*A*A |
| SEQ ID: 979 | ATGGACGACGACGACAAGgcgacctatataaagcAAAAAAAAAAAAAAAAAAAAAAA*A*A |
| SEQ ID: 980 | ATGGACGACGACGACAAGatccgccacttcagatAAAAAAAAAAAAAAAAAAAAAAA*A*A |
| SEQ ID: 981 | ATGGACGACGACGACAAGtaagcgggttcctattAAAAAAAAAAAAAAAAAAAAAAA*A*A |
| SEQ ID: 982 | ATGGACGACGACGACAAGaccctacgtaccgtcaAAAAAAAAAAAAAAAAAAAAAAA*A*A |
| SEQ ID: 983 | ATGGACGACGACGACAAGtgcgccatcggttttcAAAAAAAAAAAAAAAAAAAAAAA*A*A |
| SEQ ID: 984 | ATGGACGACGACGACAAGgcctaacttctgcctcAAAAAAAAAAAAAAAAAAAAAAA*A*A |
| SEQ ID: 985 | ATGGACGACGACGACAAGgtcctttaatcccctaAAAAAAAAAAAAAAAAAAAAAAA*A*A |
| SEQ ID: 986 | ATGGACGACGACGACAAGgattgtctagacgtagAAAAAAAAAAAAAAAAAAAAAAA*A*A |
| SEQ ID: 987 | ATGGACGACGACGACAAGaacccgcaaaatcctaAAAAAAAAAAAAAAAAAAAAAAA*A*A |
| SEQ ID: 988 | ATGGACGACGACGACAAGtacaacaccaacgctcAAAAAAAAAAAAAAAAAAAAAAA*A*A |
| SEQ ID: 989 | ATGGACGACGACGACAAGtgtgctattgtctccaAAAAAAAAAAAAAAAAAAAAAAA*A*A |
| SEQ ID: 990 | ATGGACGACGACGACAAGagatccacacccggttAAAAAAAAAAAAAAAAAAAAAAA*A*A |
| SEQ ID: 991 | ATGGACGACGACGACAAGgtggtctccaccatcaAAAAAAAAAAAAAAAAAAAAAAA*A*A |
| SEQ ID: 992 | ATGGACGACGACGACAAGgatattccgtcaaaccAAAAAAAAAAAAAAAAAAAAAAA*A*A |
| SEQ ID: 993 | ATGGACGACGACGACAAGacatcgtcgcggattaAAAAAAAAAAAAAAAAAAAAAAA*A*A |
| SEQ ID: 994 | ATGGACGACGACGACAAGaacggtatttggcggcAAAAAAAAAAAAAAAAAAAAAAA*A*A |
| SEQ ID: 995 | ATGGACGACGACGACAAGcgctggattgcaaatgAAAAAAAAAAAAAAAAAAAAAAA*A*A |
| SEQ ID: 996 | ATGGACGACGACGACAAGcaaaggggttacatcgAAAAAAAAAAAAAAAAAAAAAAA*A*A |
| SEQ ID: 997 | ATGGACGACGACGACAAGcgagcagttcaaggagAAAAAAAAAAAAAAAAAAAAAAA*A*A |
| SEQ ID: 998 | ATGGACGACGACGACAAGagtagggtccagcatgAAAAAAAAAAAAAAAAAAAAAAA*A*A |
| SEQ ID: 999 | ATGGACGACGACGACAAGatgcttgcccagtctaAAAAAAAAAAAAAAAAAAAAAAA*A*A |
| SEQ ID: | ATGGACGACGACGACAAGtcgtaaatctaggcgaAAAAAAAAAAAAAAAAAAAAAAA*A*A |
| 1000 | |
| SEQ ID: | ATGGACGACGACGACAAGtggtgacatagagcgcAAAAAAAAAAAAAAAAAAAAAAA*A*A |
| 1001 | |
| SEQ ID: | ATGGACGACGACGACAAGttggtcgacttcgaagAAAAAAAAAAAAAAAAAAAAAAA*A*A |
| 1002 | |
| SEQ ID: | ATGGACGACGACGACAAGccacttaccgtctctcAAAAAAAAAAAAAAAAAAAAAAA*A*A |
| 1003 | |
| SEQ ID: | ATGGACGACGACGACAAGtgtcctaagtcgacgaAAAAAAAAAAAAAAAAAAAAAAA*A*A |
| 1004 | |
| SEQ ID: | ATGGACGACGACGACAAGgcgaacggacgataacAAAAAAAAAAAAAAAAAAAAAAA*A*A |
| 1005 | |
| SEQ ID: | ATGGACGACGACGACAAGacggtgagtaaccatgAAAAAAAAAAAAAAAAAAAAAAA*A*A |
| 1006 | |
| SEQ ID: | ATGGACGACGACGACAAGgaatgtgagacgggctAAAAAAAAAAAAAAAAAAAAAAA*A*A |
| 1007 | |
| SEQ ID: | ATGGACGACGACGACAAGgattggtgtgctcgcaAAAAAAAAAAAAAAAAAAAAAAA*A*A |
| 1008 | |
| SEQ ID: | ATGGACGACGACGACAAGcggacttcttacgttcAAAAAAAAAAAAAAAAAAAAAAA*A*A |
| 1009 | |
| SEQ ID: | ATGGACGACGACGACAAGacatccaaaggctccaAAAAAAAAAAAAAAAAAAAAAAA*A*A |
| 1010 | |
| SEQ ID: | ATGGACGACGACGACAAGttagagtccttacacgAAAAAAAAAAAAAAAAAAAAAAA*A*A |
| 1011 | |
| SEQ ID: | ATGGACGACGACGACAAGacgctcaaggttgtgtAAAAAAAAAAAAAAAAAAAAAAA*A*A |
| 1012 | |
| SEQ ID: | ATGGACGACGACGACAAGcggggcctaataatggAAAAAAAAAAAAAAAAAAAAAAA*A*A |
| 1013 | |
| SEQ ID: | ATGGACGACGACGACAAGccgtaagcctggattgAAAAAAAAAAAAAAAAAAAAAAA*A*A |
| 1014 | |
| SEQ ID: | ATGGACGACGACGACAAGgctacgctatgtgttaAAAAAAAAAAAAAAAAAAAAAAA*A*A |
| 1015 | |
| SEQ ID: | ATGGACGACGACGACAAGaaacaccagtgggtagAAAAAAAAAAAAAAAAAAAAAAA*A*A |
| 1016 | |
| SEQ ID: | ATGGACGACGACGACAAGttgactctaaggcaggAAAAAAAAAAAAAAAAAAAAAAA*A*A |
| 1017 | |
| SEQ ID: | ATGGACGACGACGACAAGcactatttgtcttgggAAAAAAAAAAAAAAAAAAAAAAA*A*A |
| 1018 | |
| SEQ ID: | ATGGACGACGACGACAAGgctacaagttgaccatAAAAAAAAAAAAAAAAAAAAAAA*A*A |
| 1019 | |
| SEQ ID: | ATGGACGACGACGACAAGgcagtagcggatactcAAAAAAAAAAAAAAAAAAAAAAA*A*A |
| 1020 | |
| SEQ ID: | ATGGACGACGACGACAAGaactggtatcgctcacAAAAAAAAAAAAAAAAAAAAAAA*A*A |
| 1021 | |
| SEQ ID: | ATGGACGACGACGACAAGagcttgacgagcctatAAAAAAAAAAAAAAAAAAAAAAA*A*A |
| 1022 | |
| SEQ ID: | ATGGACGACGACGACAAGattgccgatgagtagaAAAAAAAAAAAAAAAAAAAAAAA*A*A |
| 1023 | |
| SEQ ID: | ATGGACGACGACGACAAGaacaggtggttacggtAAAAAAAAAAAAAAAAAAAAAAA*A*A |
| 1024 | |
| SEQ ID: | ATGGACGACGACGACAAGaaactgacgctcgaggAAAAAAAAAAAAAAAAAAAAAAA*A*A |
| 1025 | |
| SEQ ID: | ATGGACGACGACGACAAGcgaaatgtcggctcagAAAAAAAAAAAAAAAAAAAAAAA*A*A |
| 1026 | |
| SEQ ID: | ATGGACGACGACGACAAGtccgatctcagagtttAAAAAAAAAAAAAAAAAAAAAAA*A*A |
| 1027 | |
| SEQ ID: | ATGGACGACGACGACAAGactgcttcgagaagcgAAAAAAAAAAAAAAAAAAAAAAA*A*A |
| 1028 | |
| SEQ ID: | ATGGACGACGACGACAAGgtgatgctgtagggcaAAAAAAAAAAAAAAAAAAAAAAA*A*A |
| 1029 | |
| SEQ ID: | ATGGACGACGACGACAAGagtgggtatgtggtacAAAAAAAAAAAAAAAAAAAAAAA*A*A |
| 1030 | |
| SEQ ID: | ATGGACGACGACGACAAGggagtaagttcaagcaAAAAAAAAAAAAAAAAAAAAAAA*A*A |
| 1031 | |
| SEQ ID: | ATGGACGACGACGACAAGgagcagttttcgccgaAAAAAAAAAAAAAAAAAAAAAAA*A*A |
| 1032 | |
| SEQ ID: | ATGGACGACGACGACAAGcgattacgagtctaggAAAAAAAAAAAAAAAAAAAAAAA*A*A |
| 1033 | |
| SEQ ID: | ATGGACGACGACGACAAGcgcggcacttcttagaAAAAAAAAAAAAAAAAAAAAAAA*A*A |
| 1034 | |
| SEQ ID: | ATGGACGACGACGACAAGggtgcagttcctaagaAAAAAAAAAAAAAAAAAAAAAAA*A*A |
| 1035 | |
| SEQ ID: | ATGGACGACGACGACAAGcgtaggcattagaagaAAAAAAAAAAAAAAAAAAAAAAA*A*A |
| 1036 | |
| SEQ ID: | ATGGACGACGACGACAAGgctatcatcagcgcctAAAAAAAAAAAAAAAAAAAAAAA*A*A |
| 1037 | |
| SEQ ID: | ATGGACGACGACGACAAGgcgggtaggtctaaatAAAAAAAAAAAAAAAAAAAAAAA*A*A |
| 1038 | |
| SEQ ID: | ATGGACGACGACGACAAGcgtccctttgaacattAAAAAAAAAAAAAAAAAAAAAAA*A*A |
| 1039 | |
| SEQ ID: | ATGGACGACGACGACAAGtcagactgcgagacttAAAAAAAAAAAAAAAAAAAAAAA*A*A |
| 1040 | |
| SEQ ID: | ATGGACGACGACGACAAGtgtgttcgttatcggtAAAAAAAAAAAAAAAAAAAAAAA*A*A |
| 1041 | |
| SEQ ID: | ATGGACGACGACGACAAGcctaacagcgtaagcaAAAAAAAAAAAAAAAAAAAAAAA*A*A |
| 1042 | |
| SEQ ID: | ATGGACGACGACGACAAGcctgacatttccgtcaAAAAAAAAAAAAAAAAAAAAAAA*A*A |
| 1043 | |
| SEQ ID: | ATGGACGACGACGACAAGcgaaaccatcgccaatAAAAAAAAAAAAAAAAAAAAAAA*A*A |
| 1044 | |
| SEQ ID: | ATGGACGACGACGACAAGgatcacagaagagtgcAAAAAAAAAAAAAAAAAAAAAAA*A*A |
| 1045 | |
| SEQ ID: | ATGGACGACGACGACAAGacgatacagagcaggtAAAAAAAAAAAAAAAAAAAAAAA*A*A |
| 1046 | |
| SEQ ID: | ATGGACGACGACGACAAGgtcaggaacgagtcttAAAAAAAAAAAAAAAAAAAAAAA*A*A |
| 1047 | |
| SEQ ID: | ATGGACGACGACGACAAGatactgattccctgtcAAAAAAAAAAAAAAAAAAAAAAA*A*A |
| 1048 | |
| SEQ ID: | ATGGACGACGACGACAAGttttcgccatggttgtAAAAAAAAAAAAAAAAAAAAAAA*A*A |
| 1049 | |
| SEQ ID: | ATGGACGACGACGACAAGgttcctacgaacaactAAAAAAAAAAAAAAAAAAAAAAA*A*A |
| 1050 | |
| SEQ ID: | ATGGACGACGACGACAAGtcgataacgctactacAAAAAAAAAAAAAAAAAAAAAAA*A*A |
| 1051 | |
| SEQ ID: | ATGGACGACGACGACAAGtggaacacctgaagttAAAAAAAAAAAAAAAAAAAAAAA*A*A |
| 1052 | |
| SEQ ID: | ATGGACGACGACGACAAGcacgacgtgaaactctAAAAAAAAAAAAAAAAAAAAAAA*A*A |
| 1053 | |
| SEQ ID: | ATGGACGACGACGACAAGatccagtttcaagaggAAAAAAAAAAAAAAAAAAAAAAA*A*A |
| 1054 | |
| SEQ ID: | ATGGACGACGACGACAAGctgcggcgatctttcaAAAAAAAAAAAAAAAAAAAAAAA*A*A |
| 1055 | |
| SEQ ID: | ATGGACGACGACGACAAGcggacttgacttccagAAAAAAAAAAAAAAAAAAAAAAA*A*A |
| 1056 | |
| SEQ ID: | ATGGACGACGACGACAAGgtgtgaatgcataagcAAAAAAAAAAAAAAAAAAAAAAA*A*A |
| 1057 | |
| SEQ ID: | ATGGACGACGACGACAAGtcaccgtgttaggtcaAAAAAAAAAAAAAAAAAAAAAAA*A*A |
| 1058 | |
| SEQ ID: | ATGGACGACGACGACAAGggcatgattgtcgcacAAAAAAAAAAAAAAAAAAAAAAA*A*A |
| 1059 | |
| SEQ ID: | ATGGACGACGACGACAAGgcctagggacacgattAAAAAAAAAAAAAAAAAAAAAAA*A*A |
| 1060 | |
| SEQ ID: | ATGGACGACGACGACAAGacagtccaccatgatcAAAAAAAAAAAAAAAAAAAAAAA*A*A |
| 1061 | |
| SEQ ID: | ATGGACGACGACGACAAGcaaccagtatagaagcAAAAAAAAAAAAAAAAAAAAAAA*A*A |
| 1062 | |
| SEQ ID: | ATGGACGACGACGACAAGtgtaactcacgggttaAAAAAAAAAAAAAAAAAAAAAAA*A*A |
| 1063 | |
| SEQ ID: | ATGGACGACGACGACAAGatagacccttggccctAAAAAAAAAAAAAAAAAAAAAAA*A*A |
| 1064 | |
| SEQ ID: | ATGGACGACGACGACAAGctgtgtatgccctttgAAAAAAAAAAAAAAAAAAAAAAA*A*A |
| 1065 | |
| SEQ ID: | ATGGACGACGACGACAAGatcccaaacttagtgcAAAAAAAAAAAAAAAAAAAAAAA*A*A |
| 1066 | |
| SEQ ID: | ATGGACGACGACGACAAGtcttattacgcccggaAAAAAAAAAAAAAAAAAAAAAAA*A*A |
| 1067 | |
| SEQ ID: | ATGGACGACGACGACAAGacgaatagtgcgccacAAAAAAAAAAAAAAAAAAAAAAA*A*A |
| 1068 | |
| SEQ ID: | ATGGACGACGACGACAAGatgcactgatgatgcgAAAAAAAAAAAAAAAAAAAAAAA*A*A |
| 1069 | |
| SEQ ID: | ATGGACGACGACGACAAGggtaaagtgtcccaagAAAAAAAAAAAAAAAAAAAAAAA*A*A |
| 1070 | |
| SEQ ID: | ATGGACGACGACGACAAGggaagaactagtcccgAAAAAAAAAAAAAAAAAAAAAAA*A*A |
| 1071 | |
| SEQ ID: | ATGGACGACGACGACAAGtagccagatgaaatggAAAAAAAAAAAAAAAAAAAAAAA*A*A |
| 1072 | |
| SEQ ID: | ATGGACGACGACGACAAGacgacacaatgattccAAAAAAAAAAAAAAAAAAAAAAA*A*A |
| 1073 | |
| SEQ ID: | ATGGACGACGACGACAAGccatgtgaaagccaggAAAAAAAAAAAAAAAAAAAAAAA*A*A |
| 1074 | |
| SEQ ID: | ATGGACGACGACGACAAGagggtagaacctcattAAAAAAAAAAAAAAAAAAAAAAA*A*A |
| 1075 | |
| SEQ ID: | ATGGACGACGACGACAAGaacagaaacccgaagaAAAAAAAAAAAAAAAAAAAAAAA*A*A |
| 1076 | |
| SEQ ID: | ATGGACGACGACGACAAGtgggtcggaaatttacAAAAAAAAAAAAAAAAAAAAAAA*A*A |
| 1077 | |
| SEQ ID: | ATGGACGACGACGACAAGccgcagcatacaatccAAAAAAAAAAAAAAAAAAAAAAA*A*A |
| 1078 | |
| SEQ ID: | ATGGACGACGACGACAAGatccagacaacgttgaAAAAAAAAAAAAAAAAAAAAAAA*A*A |
| 1079 | |
| SEQ ID: | ATGGACGACGACGACAAGcaaatggcacgcccttAAAAAAAAAAAAAAAAAAAAAAA*A*A |
| 1080 | |
| SEQ ID: | ATGGACGACGACGACAAGccactcatatacgggtAAAAAAAAAAAAAAAAAAAAAAA*A*A |
| 1081 | |
| SEQ ID: | ATGGACGACGACGACAAGttgaccgtagaatgtgAAAAAAAAAAAAAAAAAAAAAAA*A*A |
| 1082 | |
| SEQ ID: | ATGGACGACGACGACAAGtttcatcggccagtggAAAAAAAAAAAAAAAAAAAAAAA*A*A |
| 1083 | |
| SEQ ID: | ATGGACGACGACGACAAGacgtacccggtagacaAAAAAAAAAAAAAAAAAAAAAAA*A*A |
| 1084 | |
| SEQ ID: | ATGGACGACGACGACAAGgcagggtggaacctatAAAAAAAAAAAAAAAAAAAAAAA*A*A |
| 1085 | |
| SEQ ID: | ATGGACGACGACGACAAGacgtatttattccgccAAAAAAAAAAAAAAAAAAAAAAA*A*A |
| 1086 | |
| SEQ ID: | ATGGACGACGACGACAAGtgtggtcactcggaatAAAAAAAAAAAAAAAAAAAAAAA*A*A |
| 1087 | |
| SEQ ID: | ATGGACGACGACGACAAGctggcatgttgtaggtAAAAAAAAAAAAAAAAAAAAAAA*A*A |
| 1088 | |
| SEQ ID: | ATGGACGACGACGACAAGttaggcaggtgcattgAAAAAAAAAAAAAAAAAAAAAAA*A*A |
| 1089 | |
| SEQ ID: | ATGGACGACGACGACAAGccagaggaaatggggaAAAAAAAAAAAAAAAAAAAAAAA*A*A |
| 1090 | |
| SEQ ID: | ATGGACGACGACGACAAGtgtcaacgcatgaaagAAAAAAAAAAAAAAAAAAAAAAA*A*A |
| 1091 | |
| SEQ ID: | ATGGACGACGACGACAAGcgtttcaatgcagggtAAAAAAAAAAAAAAAAAAAAAAA*A*A |
| 1092 | |
| SEQ ID: | ATGGACGACGACGACAAGgaccccggtaagtttaAAAAAAAAAAAAAAAAAAAAAAA*A*A |
| 1093 | |
| SEQ ID: | ATGGACGACGACGACAAGctcattacggacagtgAAAAAAAAAAAAAAAAAAAAAAA*A*A |
| 1094 | |
| SEQ ID: | ATGGACGACGACGACAAGgggccattagtagtgtAAAAAAAAAAAAAAAAAAAAAAA*A*A |
| 1095 | |
| SEQ ID: | ATGGACGACGACGACAAGttacacctgggaatccAAAAAAAAAAAAAAAAAAAAAAA*A*A |
| 1096 | |
| SEQ ID: | ATGGACGACGACGACAAGctctaccttagtggcgAAAAAAAAAAAAAAAAAAAAAAA*A*A |
| 1097 | |
| SEQ ID: | ATGGACGACGACGACAAGgaattgcggtatcgtcAAAAAAAAAAAAAAAAAAAAAAA*A*A |
| 1098 | |
| SEQ ID: | ATGGACGACGACGACAAGgcctcaacgcaacacaAAAAAAAAAAAAAAAAAAAAAAA*A*A |
| 1099 | |
| SEQ ID: | ATGGACGACGACGACAAGagcgactacagctgagAAAAAAAAAAAAAAAAAAAAAAA*A*A |
| 1100 | |
| SEQ ID: | ATGGACGACGACGACAAGacacacgcaaaacagtAAAAAAAAAAAAAAAAAAAAAAA*A*A |
| 1101 | |
| SEQ ID: | ATGGACGACGACGACAAGgactaagctgcaatccAAAAAAAAAAAAAAAAAAAAAAA*A*A |
| 1102 | |
| SEQ ID: | ATGGACGACGACGACAAGcatacggcgatcttagAAAAAAAAAAAAAAAAAAAAAAA*A*A |
| 1103 | |
| SEQ ID: | ATGGACGACGACGACAAGtatcgtcctatgttcgAAAAAAAAAAAAAAAAAAAAAAA*A*A |
| 1104 | |
| SEQ ID: | ATGGACGACGACGACAAGtaggtccttgggaatgAAAAAAAAAAAAAAAAAAAAAAA*A*A |
| 1105 | |
| SEQ ID: | ATGGACGACGACGACAAGctgagactagcactacAAAAAAAAAAAAAAAAAAAAAAA*A*A |
| 1106 | |
| SEQ ID: | ATGGACGACGACGACAAGgcgtttgagcatccatAAAAAAAAAAAAAAAAAAAAAAA*A*A |
| 1107 | |
| SEQ ID: | ATGGACGACGACGACAAGtaacccaacgcaacctAAAAAAAAAAAAAAAAAAAAAAA*A*A |
| 1108 | |
| SEQ ID: | ATGGACGACGACGACAAGggagttacgcatctggAAAAAAAAAAAAAAAAAAAAAAA*A*A |
| 1109 | |
| SEQ ID: | ATGGACGACGACGACAAGtttgggctcggcctatAAAAAAAAAAAAAAAAAAAAAAA*A*A |
| 1110 | |
| SEQ ID: | ATGGACGACGACGACAAGatgatgagtggaagggAAAAAAAAAAAAAAAAAAAAAAA*A*A |
| 1111 | |
| SEQ ID: | ATGGACGACGACGACAAGgtcagagcactcaaatAAAAAAAAAAAAAAAAAAAAAAA*A*A |
| 1112 | |
| SEQ ID: | ATGGACGACGACGACAAGtgcaagaaacaggcagAAAAAAAAAAAAAAAAAAAAAAA*A*A |
| 1113 | |
| SEQ ID: | ATGGACGACGACGACAAGatggcgttcaggcttcAAAAAAAAAAAAAAAAAAAAAAA*A*A |
| 1114 | |
| SEQ ID: | ATGGACGACGACGACAAGgtttagtcgcgatagcAAAAAAAAAAAAAAAAAAAAAAA*A*A |
| 1115 | |
| SEQ ID: | ATGGACGACGACGACAAGcgcagacccaatgcatAAAAAAAAAAAAAAAAAAAAAAA*A*A |
| 1116 | |
| SEQ ID: | ATGGACGACGACGACAAGtgaaatagtagcgaccAAAAAAAAAAAAAAAAAAAAAAA*A*A |
| 1117 | |
| SEQ ID: | ATGGACGACGACGACAAGcatcgccggctaaatcAAAAAAAAAAAAAAAAAAAAAAA*A*A |
| 1118 | |
| SEQ ID: | ATGGACGACGACGACAAGatgtacgggctctctcAAAAAAAAAAAAAAAAAAAAAAA*A*A |
| 1119 | |
| SEQ ID: | ATGGACGACGACGACAAGccccgttaacatatggAAAAAAAAAAAAAAAAAAAAAAA*A*A |
| 1120 | |
| SEQ ID: | ATGGACGACGACGACAAGgactcgttggcgctatAAAAAAAAAAAAAAAAAAAAAAA*A*A |
| 1121 | |
| SEQ ID: | ATGGACGACGACGACAAGgcccagacctttaggaAAAAAAAAAAAAAAAAAAAAAAA*A*A |
| 1122 | |
| SEQ ID: | ATGGACGACGACGACAAGtcccaacaattaccctAAAAAAAAAAAAAAAAAAAAAAA*A*A |
| 1123 | |
| SEQ ID: | ATGGACGACGACGACAAGcctgtgtgcatctgctAAAAAAAAAAAAAAAAAAAAAAA*A*A |
| 1124 | |
| SEQ ID: | ATGGACGACGACGACAAGggccgttccttggtaaAAAAAAAAAAAAAAAAAAAAAAA*A*A |
| 1125 | |
| SEQ ID: | ATGGACGACGACGACAAGagagtaggttgtgttgAAAAAAAAAAAAAAAAAAAAAAA*A*A |
| 1126 | |
| SEQ ID: | ATGGACGACGACGACAAGactcgataataggacgAAAAAAAAAAAAAAAAAAAAAAA*A*A |
| 1127 | |
| SEQ ID: | ATGGACGACGACGACAAGcccgacgaatggttatAAAAAAAAAAAAAAAAAAAAAAA*A*A |
| 1128 | |
| SEQ ID: | ATGGACGACGACGACAAGcgaccgaatcattcccAAAAAAAAAAAAAAAAAAAAAAA*A*A |
| 1129 | |
| SEQ ID: | ATGGACGACGACGACAAGgcctgtagactttgcaAAAAAAAAAAAAAAAAAAAAAAA*A*A |
| 1130 | |
| SEQ ID: | ATGGACGACGACGACAAGggatccaatacacctaAAAAAAAAAAAAAAAAAAAAAAA*A*A |
| 1131 | |
| SEQ ID: | ATGGACGACGACGACAAGgggagcgaattgtggaAAAAAAAAAAAAAAAAAAAAAAA*A*A |
| 1132 | |
| SEQ ID: | ATGGACGACGACGACAAGcgaccttacggcatgaAAAAAAAAAAAAAAAAAAAAAAA*A*A |
| 1133 | |
| SEQ ID: | ATGGACGACGACGACAAGccgtcacttacgtataAAAAAAAAAAAAAAAAAAAAAAA*A*A |
| 1134 | |
| SEQ ID: | ATGGACGACGACGACAAGcgcagtttcacgtaacAAAAAAAAAAAAAAAAAAAAAAA*A*A |
| 1135 | |
| SEQ ID: | ATGGACGACGACGACAAGggcaagctgaatctacAAAAAAAAAAAAAAAAAAAAAAA*A*A |
| 1136 | |
| SEQ ID: | ATGGACGACGACGACAAGtgcggctacattgccaAAAAAAAAAAAAAAAAAAAAAAA*A*A |
| 1137 | |
| SEQ ID: | ATGGACGACGACGACAAGatcttctcagtcttcgAAAAAAAAAAAAAAAAAAAAAAA*A*A |
| 1138 | |
| SEQ ID: | ATGGACGACGACGACAAGgcaggaagatagtcgtAAAAAAAAAAAAAAAAAAAAAAA*A*A |
| 1139 | |
| SEQ ID: | ATGGACGACGACGACAAGgtgatgtgtctgatacAAAAAAAAAAAAAAAAAAAAAAA*A*A |
| 1140 | |
| SEQ ID: | ATGGACGACGACGACAAGcgtagccaaagtcgtgAAAAAAAAAAAAAAAAAAAAAAA*A*A |
| 1141 | |
| SEQ ID: | ATGGACGACGACGACAAGacttcacggaactacgAAAAAAAAAAAAAAAAAAAAAAA*A*A |
| 1142 | |
| SEQ ID: | ATGGACGACGACGACAAGcgacaaggtatcagttAAAAAAAAAAAAAAAAAAAAAAA*A*A |
| 1143 | |
| SEQ ID: | ATGGACGACGACGACAAGgtatctagggaagtccAAAAAAAAAAAAAAAAAAAAAAA*A*A |
| 1144 | |
| SEQ ID: | ATGGACGACGACGACAAGaagtcagcgaggcgttAAAAAAAAAAAAAAAAAAAAAAA*A*A |
| 1145 | |
| SEQ ID: | ATGGACGACGACGACAAGcgtgtgaccatgatgaAAAAAAAAAAAAAAAAAAAAAAA*A*A |
| 1146 | |
| SEQ ID: | ATGGACGACGACGACAAGacaaagctttcaggctAAAAAAAAAAAAAAAAAAAAAAA*A*A |
| 1147 | |
| SEQ ID: | ATGGACGACGACGACAAGttagtcgtcacatcgcAAAAAAAAAAAAAAAAAAAAAAA*A*A |
| 1148 | |
| SEQ ID: | ATGGACGACGACGACAAGctagaacatgcttcgtAAAAAAAAAAAAAAAAAAAAAAA*A*A |
| 1149 | |
| SEQ ID: | ATGGACGACGACGACAAGagaaacaacgtcaaggAAAAAAAAAAAAAAAAAAAAAAA*A*A |
| 1150 | |
| SEQ ID: | ATGGACGACGACGACAAGtctgtactagctgcacAAAAAAAAAAAAAAAAAAAAAAA*A*A |
| 1151 | |
| SEQ ID: | ATGGACGACGACGACAAGtgcgcattgatggttgAAAAAAAAAAAAAAAAAAAAAAA*A*A |
| 1152 | |
| SEQ ID: | ATGGACGACGACGACAAGtctacccgactttcccAAAAAAAAAAAAAAAAAAAAAAA*A*A |
| 1153 | |
| SEQ ID: | ATGGACGACGACGACAAGtcgcttgtttgcttcaAAAAAAAAAAAAAAAAAAAAAAA*A*A |
| 1154 | |
| SEQ ID: | ATGGACGACGACGACAAGccggtcaagcagtacaAAAAAAAAAAAAAAAAAAAAAAA*A*A |
| 1155 | |
| SEQ ID: | ATGGACGACGACGACAAGttctttgaggcactagAAAAAAAAAAAAAAAAAAAAAAA*A*A |
| 1156 | |
| SEQ ID: | ATGGACGACGACGACAAGaaaagcacagttgcctAAAAAAAAAAAAAAAAAAAAAAA*A*A |
| 1157 | |
| SEQ ID: | ATGGACGACGACGACAAGcttctacctcgaggatAAAAAAAAAAAAAAAAAAAAAAA*A*A |
| 1158 | |
| SEQ ID: | ATGGACGACGACGACAAGggttccaaccttatcaAAAAAAAAAAAAAAAAAAAAAAA*A*A |
| 1159 | |
| SEQ ID: | ATGGACGACGACGACAAGctatgaccgggtgttcAAAAAAAAAAAAAAAAAAAAAAA*A*A |
| 1160 | |
| SEQ ID: | ATGGACGACGACGACAAGgagatcaggagttctaAAAAAAAAAAAAAAAAAAAAAAA*A*A |
| 1161 | |
| SEQ ID: | ATGGACGACGACGACAAGcggagatctgcagactAAAAAAAAAAAAAAAAAAAAAAA*A*A |
| 1162 | |
| SEQ ID: | ATGGACGACGACGACAAGtcttgcgatatgtctcAAAAAAAAAAAAAAAAAAAAAAA*A*A |
| 1163 | |
| SEQ ID: | ATGGACGACGACGACAAGctgtaacaactcggttAAAAAAAAAAAAAAAAAAAAAAA*A*A |
| 1164 | |
| SEQ ID: | ATGGACGACGACGACAAGggttacacgacttgctAAAAAAAAAAAAAAAAAAAAAAA*A*A |
| 1165 | |
| SEQ ID: | ATGGACGACGACGACAAGagagggaacattcgtcAAAAAAAAAAAAAAAAAAAAAAA*A*A |
| 1166 | |
| SEQ ID: | ATGGACGACGACGACAAGgggtattgaacaaacgAAAAAAAAAAAAAAAAAAAAAAA*A*A |
| 1167 | |
| SEQ ID: | ATGGACGACGACGACAAGagtgccagactggcaaAAAAAAAAAAAAAAAAAAAAAAA*A*A |
| 1168 | |
| SEQ ID: | ATGGACGACGACGACAAGggtagatgacgaggagAAAAAAAAAAAAAAAAAAAAAAA*A*A |
| 1169 | |
| SEQ ID: | ATGGACGACGACGACAAGcgtcaattctcagccgAAAAAAAAAAAAAAAAAAAAAAA*A*A |
| 1170 | |
| SEQ ID: | ATGGACGACGACGACAAGacgggagtaagtgtcaAAAAAAAAAAAAAAAAAAAAAAA*A*A |
| 1171 | |
| SEQ ID: | ATGGACGACGACGACAAGaacacttccagtgtcaAAAAAAAAAAAAAAAAAAAAAAA*A*A |
| 1172 | |
| SEQ ID: | ATGGACGACGACGACAAGcatggcggccatttcaAAAAAAAAAAAAAAAAAAAAAAA*A*A |
| 1173 | |
| SEQ ID: | ATGGACGACGACGACAAGgctgatctggattgccAAAAAAAAAAAAAAAAAAAAAAA*A*A |
| 1174 | |
| SEQ ID: | ATGGACGACGACGACAAGcgttaagtgcggtcctAAAAAAAAAAAAAAAAAAAAAAA*A*A |
| 1175 | |
| SEQ ID: | ATGGACGACGACGACAAGgcccatagtgaaacggAAAAAAAAAAAAAAAAAAAAAAA*A*A |
| 1176 | |
| SEQ ID: | ATGGACGACGACGACAAGcagaataggcaagcttAAAAAAAAAAAAAAAAAAAAAAA*A*A |
| 1177 | |
| SEQ ID: | ATGGACGACGACGACAAGtcatcgcacgactgttAAAAAAAAAAAAAAAAAAAAAAA*A*A |
| 1178 | |
| SEQ ID: | ATGGACGACGACGACAAGtccacacttgctagggAAAAAAAAAAAAAAAAAAAAAAA*A*A |
| 1179 | |
| SEQ ID: | ATGGACGACGACGACAAGtaataatagcacgcccAAAAAAAAAAAAAAAAAAAAAAA*A*A |
| 1180 | |
| SEQ ID: | ATGGACGACGACGACAAGgttcaacgccgcttacAAAAAAAAAAAAAAAAAAAAAAA*A*A |
| 1181 | |
| SEQ ID: | ATGGACGACGACGACAAGtcgagctattcccataAAAAAAAAAAAAAAAAAAAAAAA*A*A |
| 1182 | |
| SEQ ID: | ATGGACGACGACGACAAGtcccagtctggacatcAAAAAAAAAAAAAAAAAAAAAAA*A*A |
| 1183 | |
| SEQ ID: | ATGGACGACGACGACAAGccgagatcaaacttcgAAAAAAAAAAAAAAAAAAAAAAA*A*A |
| 1184 | |
| SEQ ID: | ATGGACGACGACGACAAGacgctctaatcgtcgcAAAAAAAAAAAAAAAAAAAAAAA*A*A |
| 1185 | |
| SEQ ID: | ATGGACGACGACGACAAGggtgttaacgagaacgAAAAAAAAAAAAAAAAAAAAAAA*A*A |
| 1186 | |
| SEQ ID: | ATGGACGACGACGACAAGctctatacgggtcagaAAAAAAAAAAAAAAAAAAAAAAA*A*A |
| 1187 | |
| SEQ ID: | ATGGACGACGACGACAAGcatctcccctgtcattAAAAAAAAAAAAAAAAAAAAAAA*A*A |
| 1188 | |
| SEQ ID: | ATGGACGACGACGACAAGgcagatgtgtcggttgAAAAAAAAAAAAAAAAAAAAAAA*A*A |
| 1189 | |
| SEQ ID: | ATGGACGACGACGACAAGacgaacttcccttatgAAAAAAAAAAAAAAAAAAAAAAA*A*A |
| 1190 | |
| SEQ ID: | ATGGACGACGACGACAAGgagtcactccgtcactAAAAAAAAAAAAAAAAAAAAAAA*A*A |
| 1191 | |
| SEQ ID: | ATGGACGACGACGACAAGttcgagacgtgagcgtAAAAAAAAAAAAAAAAAAAAAAA*A*A |
| 1192 | |
| SEQ ID: | ATGGACGACGACGACAAGaatactgtggcacctcAAAAAAAAAAAAAAAAAAAAAAA*A*A |
| 1193 | |
| SEQ ID: | ATGGACGACGACGACAAGcaaagttcagtgtgagAAAAAAAAAAAAAAAAAAAAAAA*A*A |
| 1194 | |
| SEQ ID: | ATGGACGACGACGACAAGatttgccattgccttcAAAAAAAAAAAAAAAAAAAAAAA*A*A |
| 1195 | |
| SEQ ID: | ATGGACGACGACGACAAGacgtaccatatgcgatAAAAAAAAAAAAAAAAAAAAAAA*A*A |
| 1196 | |
| SEQ ID: | ATGGACGACGACGACAAGcccagtcgggaattatAAAAAAAAAAAAAAAAAAAAAAA*A*A |
| 1197 | |
| SEQ ID: | ATGGACGACGACGACAAGgcaatatctatgggccAAAAAAAAAAAAAAAAAAAAAAA*A*A |
| 1198 | |
| SEQ ID: | ATGGACGACGACGACAAGcttgtcctcaagtgagAAAAAAAAAAAAAAAAAAAAAAA*A*A |
| 1199 | |
| SEQ ID: | ATGGACGACGACGACAAGttgctaaacatgggcaAAAAAAAAAAAAAAAAAAAAAAA*A*A |
| 1200 | |
| SEQ ID: | ATGGACGACGACGACAAGtcagagtctaataggcAAAAAAAAAAAAAAAAAAAAAAA*A*A |
| 1201 | |
| SEQ ID: | ATGGACGACGACGACAAGgtggttcccgtttgatAAAAAAAAAAAAAAAAAAAAAAA*A*A |
| 1202 | |
| SEQ ID: | ATGGACGACGACGACAAGgtgtcctgatagggatAAAAAAAAAAAAAAAAAAAAAAA*A*A |
| 1203 | |
| SEQ ID: | ATGGACGACGACGACAAGcttttccagcataccgAAAAAAAAAAAAAAAAAAAAAAA*A*A |
| 1204 | |
| SEQ ID: | ATGGACGACGACGACAAGagtcacggatttctagAAAAAAAAAAAAAAAAAAAAAAA*A*A |
| 1205 | |
| SEQ ID: | ATGGACGACGACGACAAGatgggtcacaaccagtAAAAAAAAAAAAAAAAAAAAAAA*A*A |
| 1206 | |
| SEQ ID: | ATGGACGACGACGACAAGgcacaggacagtaactAAAAAAAAAAAAAAAAAAAAAAA*A*A |
| 1207 | |
| SEQ ID: | ATGGACGACGACGACAAGcatctacaacggaacaAAAAAAAAAAAAAAAAAAAAAAA*A*A |
| 1208 | |
| SEQ ID: | ATGGACGACGACGACAAGataagaccgtaaaggcAAAAAAAAAAAAAAAAAAAAAAA*A*A |
| 1209 | |
| SEQ ID: | ATGGACGACGACGACAAGgctcgcttcgctagttAAAAAAAAAAAAAAAAAAAAAAA*A*A |
| 1210 | |
| SEQ ID: | ATGGACGACGACGACAAGgaaagcctataccactAAAAAAAAAAAAAAAAAAAAAAA*A*A |
| 1211 | |
| SEQ ID: | ATGGACGACGACGACAAGggtaaagacggtgtccAAAAAAAAAAAAAAAAAAAAAAA*A*A |
| 1212 | |
| SEQ ID: | ATGGACGACGACGACAAGttgttcggcctgaggtAAAAAAAAAAAAAAAAAAAAAAA*A*A |
| 1213 | |
| SEQ ID: | ATGGACGACGACGACAAGgtcggctagagaacacAAAAAAAAAAAAAAAAAAAAAAA*A*A |
| 1214 | |
| SEQ ID: | ATGGACGACGACGACAAGagagtccgtgcgatatAAAAAAAAAAAAAAAAAAAAAAA*A*A |
| 1215 | |
| SEQ ID: | ATGGACGACGACGACAAGatatcgcgcagtaccaAAAAAAAAAAAAAAAAAAAAAAA*A*A |
| 1216 | |
| SEQ ID: | ATGGACGACGACGACAAGcaaagctacgggctttAAAAAAAAAAAAAAAAAAAAAAA*A*A |
| 1217 | |
| SEQ ID: | ATGGACGACGACGACAAGaccgcaaaccacatttAAAAAAAAAAAAAAAAAAAAAAA*A*A |
| 1218 | |
| SEQ ID: | ATGGACGACGACGACAAGcggttaagctgattgtAAAAAAAAAAAAAAAAAAAAAAA*A*A |
| 1219 | |
| SEQ ID: | ATGGACGACGACGACAAGtttgtctcacgtccagAAAAAAAAAAAAAAAAAAAAAAA*A*A |
| 1220 | |
| SEQ ID: | ATGGACGACGACGACAAGcttccgcgagcaaaagAAAAAAAAAAAAAAAAAAAAAAA*A*A |
| 1221 | |
| SEQ ID: | ATGGACGACGACGACAAGcaagtcggatctactaAAAAAAAAAAAAAAAAAAAAAAA*A*A |
| 1222 | |
| SEQ ID: | ATGGACGACGACGACAAGaatactcgcgacggctAAAAAAAAAAAAAAAAAAAAAAA*A*A |
| 1223 | |
| SEQ ID: | ATGGACGACGACGACAAGcgcctatcgccgttttAAAAAAAAAAAAAAAAAAAAAAA*A*A |
| 1224 | |
| SEQ ID: | ATGGACGACGACGACAAGgtttactactacacgcAAAAAAAAAAAAAAAAAAAAAAA*A*A |
| 1225 | |
| SEQ ID: | ATGGACGACGACGACAAGgttaaggttacgtcacAAAAAAAAAAAAAAAAAAAAAAA*A*A |
| 1226 | |
| SEQ ID: | ATGGACGACGACGACAAGagctgttcacacgaccAAAAAAAAAAAAAAAAAAAAAAA*A*A |
| 1227 | |
| SEQ ID: | ATGGACGACGACGACAAGcaatactctctggcatAAAAAAAAAAAAAAAAAAAAAAA*A*A |
| 1228 | |
| SEQ ID: | ATGGACGACGACGACAAGttccagtgcatgcgttAAAAAAAAAAAAAAAAAAAAAAA*A*A |
| 1229 | |
| SEQ ID: | ATGGACGACGACGACAAGtgccttttccccgcatAAAAAAAAAAAAAAAAAAAAAAA*A*A |
| 1230 | |
| SEQ ID: | ATGGACGACGACGACAAGcctaacccaaggaagcAAAAAAAAAAAAAAAAAAAAAAA*A*A |
| 1231 | |
| SEQ ID: | ATGGACGACGACGACAAGtagtcttacatctccgAAAAAAAAAAAAAAAAAAAAAAA*A*A |
| 1232 | |
| SEQ ID: | ATGGACGACGACGACAAGctagggtaggctatagAAAAAAAAAAAAAAAAAAAAAAA*A*A |
| 1233 | |
| SEQ ID: | ATGGACGACGACGACAAGtcttgtggaggcttttAAAAAAAAAAAAAAAAAAAAAAA*A*A |
| 1234 | |
| SEQ ID: | ATGGACGACGACGACAAGggaacgagaattacgtAAAAAAAAAAAAAAAAAAAAAAA*A*A |
| 1235 | |
| SEQ ID: | ATGGACGACGACGACAAGggtaagaaatgcttggAAAAAAAAAAAAAAAAAAAAAAA*A*A |
| 1236 | |
| SEQ ID: | ATGGACGACGACGACAAGagtcttcaccaactcaAAAAAAAAAAAAAAAAAAAAAAA*A*A |
| 1237 | |
| SEQ ID: | ATGGACGACGACGACAAGtcaacaaagccttgctAAAAAAAAAAAAAAAAAAAAAAA*A*A |
| 1238 | |
| SEQ ID: | ATGGACGACGACGACAAGggttgctagctctaagAAAAAAAAAAAAAAAAAAAAAAA*A*A |
| 1239 | |
| SEQ ID: | ATGGACGACGACGACAAGcttaccttgttcacctAAAAAAAAAAAAAAAAAAAAAAA*A*A |
| 1240 | |
| SEQ ID: | ATGGACGACGACGACAAGaacatgtagaggggtgAAAAAAAAAAAAAAAAAAAAAAA*A*A |
| 1241 | |
| SEQ ID: | ATGGACGACGACGACAAGttgggttccttcacttAAAAAAAAAAAAAAAAAAAAAAA*A*A |
| 1242 | |
| SEQ ID: | ATGGACGACGACGACAAGgcaccatgctacagtgAAAAAAAAAAAAAAAAAAAAAAA*A*A |
| 1243 | |
| SEQ ID: | ATGGACGACGACGACAAGatgcatgagaaagggaAAAAAAAAAAAAAAAAAAAAAAA*A*A |
| 1244 | |
| SEQ ID: | ATGGACGACGACGACAAGccactagtgagatagaAAAAAAAAAAAAAAAAAAAAAAA*A*A |
| 1245 | |
| SEQ ID: | ATGGACGACGACGACAAGcgacacaccaatattgAAAAAAAAAAAAAAAAAAAAAAA*A*A |
| 1246 | |
| SEQ ID: | ATGGACGACGACGACAAGcagatagtcttgtcacAAAAAAAAAAAAAAAAAAAAAAA*A*A |
| 1247 | |
| SEQ ID: | ATGGACGACGACGACAAGttgtcgagggatacttAAAAAAAAAAAAAAAAAAAAAAA*A*A |
| 1248 | |
| SEQ ID: | ATGGACGACGACGACAAGcgttgagcacctttgcAAAAAAAAAAAAAAAAAAAAAAA*A*A |
| 1249 | |
| SEQ ID: | ATGGACGACGACGACAAGaacagagaagaatcgcAAAAAAAAAAAAAAAAAAAAAAA*A*A |
| 1250 | |
| SEQ ID: | ATGGACGACGACGACAAGgcgtgcttgtactccaAAAAAAAAAAAAAAAAAAAAAAA*A*A |
| 1251 | |
| SEQ ID: | ATGGACGACGACGACAAGttcacgcctcattgatAAAAAAAAAAAAAAAAAAAAAAA*A*A |
| 1252 | |
| SEQ ID: | ATGGACGACGACGACAAGccggcatccgttatacAAAAAAAAAAAAAAAAAAAAAAA*A*A |
| 1253 | |
| SEQ ID: | ATGGACGACGACGACAAGtgagcgttaaccagatAAAAAAAAAAAAAAAAAAAAAAA*A*A |
| 1254 | |
| SEQ ID: | ATGGACGACGACGACAAGtgccgattagcctacgAAAAAAAAAAAAAAAAAAAAAAA*A*A |
| 1255 | |
| SEQ ID: | ATGGACGACGACGACAAGtgttcgtgtggcgcatAAAAAAAAAAAAAAAAAAAAAAA*A*A |
| 1256 | |
| SEQ ID: | ATGGACGACGACGACAAGaccggtagcttatcacAAAAAAAAAAAAAAAAAAAAAAA*A*A |
| 1257 | |
| SEQ ID: | ATGGACGACGACGACAAGacgggagctcactgatAAAAAAAAAAAAAAAAAAAAAAA*A*A |
| 1258 | |
| SEQ ID: | ATGGACGACGACGACAAGgtataactcgagagctAAAAAAAAAAAAAAAAAAAAAAA*A*A |
| 1259 | |
| SEQ ID: | ATGGACGACGACGACAAGcccatcggttatccctAAAAAAAAAAAAAAAAAAAAAAA*A*A |
| 1260 | |
| SEQ ID: | ATGGACGACGACGACAAGagacatgccccgctatAAAAAAAAAAAAAAAAAAAAAAA*A*A |
| 1261 | |
| SEQ ID: | ATGGACGACGACGACAAGgtttctaatcgtccgcAAAAAAAAAAAAAAAAAAAAAAA*A*A |
| 1262 | |
| SEQ ID: | ATGGACGACGACGACAAGgaatgaagcttcgacaAAAAAAAAAAAAAAAAAAAAAAA*A*A |
| 1263 | |
| SEQ ID: | ATGGACGACGACGACAAGgcgattgacccattgaAAAAAAAAAAAAAAAAAAAAAAA*A*A |
| 1264 | |
| SEQ ID: | ATGGACGACGACGACAAGgttggtcctctagagaAAAAAAAAAAAAAAAAAAAAAAA*A*A |
| 1265 | |
| SEQ ID: | ATGGACGACGACGACAAGttgttattcgcccctcAAAAAAAAAAAAAAAAAAAAAAA*A*A |
| 1266 | |
| SEQ ID: | ATGGACGACGACGACAAGattggtgtgtagagctAAAAAAAAAAAAAAAAAAAAAAA*A*A |
| 1267 | |
| SEQ ID: | ATGGACGACGACGACAAGtgccggatgtaattgcAAAAAAAAAAAAAAAAAAAAAAA*A*A |
| 1268 | |
| SEQ ID: | ATGGACGACGACGACAAGagaaacgaaacgttcgAAAAAAAAAAAAAAAAAAAAAAA*A*A |
| 1269 | |
| SEQ ID: | ATGGACGACGACGACAAGcccaaggatggtgctaAAAAAAAAAAAAAAAAAAAAAAA*A*A |
| 1270 | |
| SEQ ID: | ATGGACGACGACGACAAGggaatgggcgagttcaAAAAAAAAAAAAAAAAAAAAAAA*A*A |
| 1271 | |
| SEQ ID: | ATGGACGACGACGACAAGccagcttacccgtattAAAAAAAAAAAAAAAAAAAAAAA*A*A |
| 1272 | |
| SEQ ID: | ATGGACGACGACGACAAGtacgctttaccgtcccAAAAAAAAAAAAAAAAAAAAAAA*A*A |
| 1273 | |
| SEQ ID: | ATGGACGACGACGACAAGgcgcttcgattctattAAAAAAAAAAAAAAAAAAAAAAA*A*A |
| 1274 | |
| SEQ ID: | ATGGACGACGACGACAAGgcaagtgtgggaacgtAAAAAAAAAAAAAAAAAAAAAAA*A*A |
| 1275 | |
| SEQ ID: | ATGGACGACGACGACAAGgaagctcaattggccaAAAAAAAAAAAAAAAAAAAAAAA*A*A |
| 1276 | |
| SEQ ID: | ATGGACGACGACGACAAGttttccaccctgcatcAAAAAAAAAAAAAAAAAAAAAAA*A*A |
| 1277 | |
| SEQ ID: | ATGGACGACGACGACAAGgtcttcgggtgagtttAAAAAAAAAAAAAAAAAAAAAAA*A*A |
| 1278 | |
| SEQ ID: | ATGGACGACGACGACAAGagaatgctgctggtttAAAAAAAAAAAAAAAAAAAAAAA*A*A |
| 1279 | |
| SEQ ID: | ATGGACGACGACGACAAGtgcatcacgttagacgAAAAAAAAAAAAAAAAAAAAAAA*A*A |
| 1280 | |
| SEQ ID: | ATGGACGACGACGACAAGtcgttgccatgaactcAAAAAAAAAAAAAAAAAAAAAAA*A*A |
| 1281 | |
| SEQ ID: | ATGGACGACGACGACAAGtgacgcttgccatctaAAAAAAAAAAAAAAAAAAAAAAA*A*A |
| 1282 | |
| SEQ ID: | ATGGACGACGACGACAAGggcctgtaaggattacAAAAAAAAAAAAAAAAAAAAAAA*A*A |
| 1283 | |
| SEQ ID: | ATGGACGACGACGACAAGgccgattcgattcactAAAAAAAAAAAAAAAAAAAAAAA*A*A |
| 1284 | |
| SEQ ID: | ATGGACGACGACGACAAGggagaaccagaacgacAAAAAAAAAAAAAAAAAAAAAAA*A*A |
| 1285 | |
| SEQ ID: | ATGGACGACGACGACAAGaacgccttttacgtgtAAAAAAAAAAAAAAAAAAAAAAA*A*A |
| 1286 | |
| SEQ ID: | ATGGACGACGACGACAAGaagtcccctctactgcAAAAAAAAAAAAAAAAAAAAAAA*A*A |
| 1287 | |
| SEQ ID: | ATGGACGACGACGACAAGacattcaggtccctccAAAAAAAAAAAAAAAAAAAAAAA*A*A |
| 1288 | |
| SEQ ID: | ATGGACGACGACGACAAGtaggggatggttctggAAAAAAAAAAAAAAAAAAAAAAA*A*A |
| 1289 | |
| SEQ ID: | ATGGACGACGACGACAAGcaagtggatggagaggAAAAAAAAAAAAAAAAAAAAAAA*A*A |
| 1290 | |
| SEQ ID: | ATGGACGACGACGACAAGgctctctacaaaggggAAAAAAAAAAAAAAAAAAAAAAA*A*A |
| 1291 | |
| SEQ ID: | ATGGACGACGACGACAAGgtacaatagacgagtcAAAAAAAAAAAAAAAAAAAAAAA*A*A |
| 1292 | |
| SEQ ID: | ATGGACGACGACGACAAGctaaagtcatcctgccAAAAAAAAAAAAAAAAAAAAAAA*A*A |
| 1293 | |
| SEQ ID: | ATGGACGACGACGACAAGcctattgtactcctcgAAAAAAAAAAAAAAAAAAAAAAA*A*A |
| 1294 | |
| SEQ ID: | ATGGACGACGACGACAAGtatgacgctgtaggcgAAAAAAAAAAAAAAAAAAAAAAA*A*A |
| 1295 | |
| SEQ ID: | ATGGACGACGACGACAAGgctaggtctgactgtcAAAAAAAAAAAAAAAAAAAAAAA*A*A |
| 1296 | |
| SEQ ID: | ATGGACGACGACGACAAGtccagagaatgtgagtAAAAAAAAAAAAAAAAAAAAAAA*A*A |
| 1297 | |
| SEQ ID: | ATGGACGACGACGACAAGtgcttcagtcacagtaAAAAAAAAAAAAAAAAAAAAAAA*A*A |
| 1298 | |
| SEQ ID: | ATGGACGACGACGACAAGttggtgactccgacctAAAAAAAAAAAAAAAAAAAAAAA*A*A |
| 1299 | |
| SEQ ID: | ATGGACGACGACGACAAGgcttcccattcatactAAAAAAAAAAAAAAAAAAAAAAA*A*A |
| 1300 | |
| SEQ ID: | ATGGACGACGACGACAAGtatgtcaactcgcgggAAAAAAAAAAAAAAAAAAAAAAA*A*A |
| 1301 | |
| SEQ ID: | ATGGACGACGACGACAAGaccaacggcttcttgaAAAAAAAAAAAAAAAAAAAAAAA*A*A |
| 1302 | |
| SEQ ID: | ATGGACGACGACGACAAGgtccacccaccatattAAAAAAAAAAAAAAAAAAAAAAA*A*A |
| 1303 | |
| SEQ ID: | ATGGACGACGACGACAAGaaagatcccggctataAAAAAAAAAAAAAAAAAAAAAAA*A*A |
| 1304 | |
| SEQ ID: | ATGGACGACGACGACAAGgggacatcgtttaacaAAAAAAAAAAAAAAAAAAAAAAA*A*A |
| 1305 | |
| SEQ ID: | ATGGACGACGACGACAAGctcgtgcatccacgtaAAAAAAAAAAAAAAAAAAAAAAA*A*A |
| 1306 | |
| SEQ ID: | ATGGACGACGACGACAAGaccggactctggtactAAAAAAAAAAAAAAAAAAAAAAA*A*A |
| 1307 | |
| SEQ ID: | ATGGACGACGACGACAAGctgtagtgcgcagtatAAAAAAAAAAAAAAAAAAAAAAA*A*A |
| 1308 | |
| SEQ ID: | ATGGACGACGACGACAAGacacttcggtgacctgAAAAAAAAAAAAAAAAAAAAAAA*A*A |
| 1309 | |
| SEQ ID: | ATGGACGACGACGACAAGtactgcttccgactgaAAAAAAAAAAAAAAAAAAAAAAA*A*A |
| 1310 | |
| SEQ ID: | ATGGACGACGACGACAAGgtttcagcccaaacttAAAAAAAAAAAAAAAAAAAAAAA*A*A |
| 1311 | |
| SEQ ID: | ATGGACGACGACGACAAGcgtactgacctcgagtAAAAAAAAAAAAAAAAAAAAAAA*A*A |
| 1312 | |
| SEQ ID: | ATGGACGACGACGACAAGgcgtcaaacttttgagAAAAAAAAAAAAAAAAAAAAAAA*A*A |
| 1313 | |
| SEQ ID: | ATGGACGACGACGACAAGatccctttggatccctAAAAAAAAAAAAAAAAAAAAAAA*A*A |
| 1314 | |
| SEQ ID: | ATGGACGACGACGACAAGcttcgttgttcatcgtAAAAAAAAAAAAAAAAAAAAAAA*A*A |
| 1315 | |
| SEQ ID: | ATGGACGACGACGACAAGcgtctaggataccataAAAAAAAAAAAAAAAAAAAAAAA*A*A |
| 1316 | |
| SEQ ID: | ATGGACGACGACGACAAGctaagccaaatctcgcAAAAAAAAAAAAAAAAAAAAAAA*A*A |
| 1317 | |
| SEQ ID: | ATGGACGACGACGACAAGggacgtagagcactagAAAAAAAAAAAAAAAAAAAAAAA*A*A |
| 1318 | |
| SEQ ID: | ATGGACGACGACGACAAGacccctgatagatcttAAAAAAAAAAAAAAAAAAAAAAA*A*A |
| 1319 | |
| SEQ ID: | ATGGACGACGACGACAAGagcactgcggtttgttAAAAAAAAAAAAAAAAAAAAAAA*A*A |
| 1320 | |
| SEQ ID: | ATGGACGACGACGACAAGcgctctatgtaggaatAAAAAAAAAAAAAAAAAAAAAAA*A*A |
| 1321 | |
| SEQ ID: | ATGGACGACGACGACAAGctttgataccatgggaAAAAAAAAAAAAAAAAAAAAAAA*A*A |
| 1322 | |
| SEQ ID: | ATGGACGACGACGACAAGccaccaccatcttctgAAAAAAAAAAAAAAAAAAAAAAA*A*A |
| 1323 | |
| SEQ ID: | ATGGACGACGACGACAAGcagtcgtattgggaccAAAAAAAAAAAAAAAAAAAAAAA*A*A |
| 1324 | |
| SEQ ID: | ATGGACGACGACGACAAGggtgtacatctgttgtAAAAAAAAAAAAAAAAAAAAAAA*A*A |
| 1325 | |
| SEQ ID: | ATGGACGACGACGACAAGcttgtggagagtcgatAAAAAAAAAAAAAAAAAAAAAAA*A*A |
| 1326 | |
| SEQ ID: | ATGGACGACGACGACAAGactttaagcccgcgttAAAAAAAAAAAAAAAAAAAAAAA*A*A |
| 1327 | |
| SEQ ID: | ATGGACGACGACGACAAGgaaaacggtcttccgaAAAAAAAAAAAAAAAAAAAAAAA*A*A |
| 1328 | |
| SEQ ID: | ATGGACGACGACGACAAGcctcactcgtgtttccAAAAAAAAAAAAAAAAAAAAAAA*A*A |
| 1329 | |
| SEQ ID: | ATGGACGACGACGACAAGgttacatccggccagtAAAAAAAAAAAAAAAAAAAAAAA*A*A |
| 1330 | |
| SEQ ID: | ATGGACGACGACGACAAGtccgagataatctaggAAAAAAAAAAAAAAAAAAAAAAA*A*A |
| 1331 | |
| SEQ ID: | ATGGACGACGACGACAAGgcactatcacctcagaAAAAAAAAAAAAAAAAAAAAAAA*A*A |
| 1332 | |
| SEQ ID: | ATGGACGACGACGACAAGtcaggaggtcgtacctAAAAAAAAAAAAAAAAAAAAAAA*A*A |
| 1333 | |
| SEQ ID: | ATGGACGACGACGACAAGaattgtgctcatcgggAAAAAAAAAAAAAAAAAAAAAAA*A*A |
| 1334 | |
| SEQ ID: | ATGGACGACGACGACAAGcggcccgattctaatcAAAAAAAAAAAAAAAAAAAAAAA*A*A |
| 1335 | |
| SEQ ID: | ATGGACGACGACGACAAGtgtatggcagcaagacAAAAAAAAAAAAAAAAAAAAAAA*A*A |
| 1336 | |
| SEQ ID: | ATGGACGACGACGACAAGcaaagaccgacgaattAAAAAAAAAAAAAAAAAAAAAAA*A*A |
| 1337 | |
| SEQ ID: | ATGGACGACGACGACAAGgtgcctctgttcatggAAAAAAAAAAAAAAAAAAAAAAA*A*A |
| 1338 | |
| SEQ ID: | ATGGACGACGACGACAAGgaacgaagtggtagtcAAAAAAAAAAAAAAAAAAAAAAA*A*A |
| 1339 | |
| SEQ ID: | ATGGACGACGACGACAAGgtctcgactagatttgAAAAAAAAAAAAAAAAAAAAAAA*A*A |
| 1340 | |
| SEQ ID: | ATGGACGACGACGACAAGcactcccgaatggtgtAAAAAAAAAAAAAAAAAAAAAAA*A*A |
| 1341 | |
| SEQ ID: | ATGGACGACGACGACAAGaagaaagataaccgcgAAAAAAAAAAAAAAAAAAAAAAA*A*A |
| 1342 | |
| SEQ ID: | ATGGACGACGACGACAAGaaccagagggagggatAAAAAAAAAAAAAAAAAAAAAAA*A*A |
| 1343 | |
| SEQ ID: | ATGGACGACGACGACAAGgctgtcgctacgaattAAAAAAAAAAAAAAAAAAAAAAA*A*A |
| 1344 | |
| SEQ ID: | ATGGACGACGACGACAAGtctcccactggtgactAAAAAAAAAAAAAAAAAAAAAAA*A*A |
| 1345 | |
| SEQ ID: | ATGGACGACGACGACAAGcagactaggaggagagAAAAAAAAAAAAAAAAAAAAAAA*A*A |
| 1346 | |
| SEQ ID: | ATGGACGACGACGACAAGgcagacaggacatcagAAAAAAAAAAAAAAAAAAAAAAA*A*A |
| 1347 | |
| SEQ ID: | ATGGACGACGACGACAAGtccatggaagtgtaccAAAAAAAAAAAAAAAAAAAAAAA*A*A |
| 1348 | |
| SEQ ID: | ATGGACGACGACGACAAGgtcattgactgtagtcAAAAAAAAAAAAAAAAAAAAAAA*A*A |
| 1349 | |
| SEQ ID: | ATGGACGACGACGACAAGctcggaccttttctcgAAAAAAAAAAAAAAAAAAAAAAA*A*A |
| 1350 | |
| SEQ ID: | ATGGACGACGACGACAAGtgctgatggtaaaccgAAAAAAAAAAAAAAAAAAAAAAA*A*A |
| 1351 | |
| SEQ ID: | ATGGACGACGACGACAAGggctttcggtggtacaAAAAAAAAAAAAAAAAAAAAAAA*A*A |
| 1352 | |
| SEQ ID: | ATGGACGACGACGACAAGcacatccaaccagcacAAAAAAAAAAAAAAAAAAAAAAA*A*A |
| 1353 | |
| SEQ ID: | ATGGACGACGACGACAAGaccatcccgaaacgagAAAAAAAAAAAAAAAAAAAAAAA*A*A |
| 1354 | |
| SEQ ID: | ATGGACGACGACGACAAGgagctacctcacattaAAAAAAAAAAAAAAAAAAAAAAA*A*A |
| 1355 | |
| SEQ ID: | ATGGACGACGACGACAAGgatagtaccatgcgttAAAAAAAAAAAAAAAAAAAAAAA*A*A |
| 1356 | |
| SEQ ID: | ATGGACGACGACGACAAGgacataggaggtcatgAAAAAAAAAAAAAAAAAAAAAAA*A*A |
| 1357 | |
| SEQ ID: | ATGGACGACGACGACAAGtgtcgtatcactatccAAAAAAAAAAAAAAAAAAAAAAA*A*A |
| 1358 | |
| SEQ ID: | ATGGACGACGACGACAAGctgcaagtgggcgaatAAAAAAAAAAAAAAAAAAAAAAA*A*A |
| 1359 | |
| SEQ ID: | ATGGACGACGACGACAAGagatccgataacgtacAAAAAAAAAAAAAAAAAAAAAAA*A*A |
| 1360 | |
| SEQ ID: | ATGGACGACGACGACAAGattgtaggtgcccaccAAAAAAAAAAAAAAAAAAAAAAA*A*A |
| 1361 | |
| SEQ ID: | ATGGACGACGACGACAAGaaagtaacaacgggagAAAAAAAAAAAAAAAAAAAAAAA*A*A |
| 1362 | |
| SEQ ID: | ATGGACGACGACGACAAGtttccaatttgcgctcAAAAAAAAAAAAAAAAAAAAAAA*A*A |
| 1363 | |
| SEQ ID: | ATGGACGACGACGACAAGttgcagctctctcgagAAAAAAAAAAAAAAAAAAAAAAA*A*A |
| 1364 | |
| SEQ ID: | ATGGACGACGACGACAAGaccatccttgcatttcAAAAAAAAAAAAAAAAAAAAAAA*A*A |
| 1365 | |
| SEQ ID: | ATGGACGACGACGACAAGtcctcggtttgtccagAAAAAAAAAAAAAAAAAAAAAAA*A*A |
| 1366 | |
| SEQ ID: | ATGGACGACGACGACAAGtactcatccgtgaactAAAAAAAAAAAAAAAAAAAAAAA*A*A |
| 1367 | |
| SEQ ID: | ATGGACGACGACGACAAGtgttacctagtccctgAAAAAAAAAAAAAAAAAAAAAAA*A*A |
| 1368 | |
| SEQ ID: | ATGGACGACGACGACAAGacctataacgtgggcgAAAAAAAAAAAAAAAAAAAAAAA*A*A |
| 1369 | |
| SEQ ID: | ATGGACGACGACGACAAGcaaggttgctgtgtgcAAAAAAAAAAAAAAAAAAAAAAA*A*A |
| 1370 | |
| SEQ ID: | ATGGACGACGACGACAAGacgcagttgcacacttAAAAAAAAAAAAAAAAAAAAAAA*A*A |
| 1371 | |
| SEQ ID: | ATGGACGACGACGACAAGaagggtcaggtgaggaAAAAAAAAAAAAAAAAAAAAAAA*A*A |
| 1372 | |
| SEQ ID: | ATGGACGACGACGACAAGtgttgaggctgcaggaAAAAAAAAAAAAAAAAAAAAAAA*A*A |
| 1373 | |
| SEQ ID: | ATGGACGACGACGACAAGgtccgagtgtattctgAAAAAAAAAAAAAAAAAAAAAAA*A*A |
| 1374 | |
| SEQ ID: | ATGGACGACGACGACAAGtcaagaacctagcgagAAAAAAAAAAAAAAAAAAAAAAA*A*A |
| 1375 | |
| SEQ ID: | ATGGACGACGACGACAAGtcttatatgaggcgtgAAAAAAAAAAAAAAAAAAAAAAA*A*A |
| 1376 | |
| SEQ ID: | ATGGACGACGACGACAAGttatgtcgcgttccgtAAAAAAAAAAAAAAAAAAAAAAA*A*A |
| 1377 | |
| SEQ ID: | ATGGACGACGACGACAAGcattgctcagccacacAAAAAAAAAAAAAAAAAAAAAAA*A*A |
| 1378 | |
| SEQ ID: | ATGGACGACGACGACAAGtttatgcacacttgccAAAAAAAAAAAAAAAAAAAAAAA*A*A |
| 1379 | |
| SEQ ID: | ATGGACGACGACGACAAGagttatcgggcacgatAAAAAAAAAAAAAAAAAAAAAAA*A*A |
| 1380 | |
| SEQ ID: | ATGGACGACGACGACAAGttggcatcccgattctAAAAAAAAAAAAAAAAAAAAAAA*A*A |
| 1381 | |
| SEQ ID: | ATGGACGACGACGACAAGaatgtacgaagtccctAAAAAAAAAAAAAAAAAAAAAAA*A*A |
| 1382 | |
| SEQ ID: | ATGGACGACGACGACAAGgatgaatggccttcttAAAAAAAAAAAAAAAAAAAAAAA*A*A |
| 1383 | |
| SEQ ID: | ATGGACGACGACGACAAGaaacgtcaacctcgccAAAAAAAAAAAAAAAAAAAAAAA*A*A |
| 1384 | |
| SEQ ID: | ATGGACGACGACGACAAGcacgttcgccagaaatAAAAAAAAAAAAAAAAAAAAAAA*A*A |
| 1385 | |
| SEQ ID: | ATGGACGACGACGACAAGcagatctaaatgcacgAAAAAAAAAAAAAAAAAAAAAAA*A*A |
| 1386 | |
| SEQ ID: | ATGGACGACGACGACAAGattctcgcaactgtctAAAAAAAAAAAAAAAAAAAAAAA*A*A |
| 1387 | |
| SEQ ID: | ATGGACGACGACGACAAGagcatggttcccaactAAAAAAAAAAAAAAAAAAAAAAA*A*A |
| 1388 | |
| SEQ ID: | ATGGACGACGACGACAAGagggaatgcttgatctAAAAAAAAAAAAAAAAAAAAAAA*A*A |
| 1389 | |
| SEQ ID: | ATGGACGACGACGACAAGccccacagtattcagcAAAAAAAAAAAAAAAAAAAAAAA*A*A |
| 1390 | |
| SEQ ID: | ATGGACGACGACGACAAGagcgtactggacaagcAAAAAAAAAAAAAAAAAAAAAAA*A*A |
| 1391 | |
| SEQ ID: | ATGGACGACGACGACAAGcggttcatcgttgaccAAAAAAAAAAAAAAAAAAAAAAA*A*A |
| 1392 | |
| SEQ ID: | ATGGACGACGACGACAAGgggtgtactaggtaatAAAAAAAAAAAAAAAAAAAAAAA*A*A |
| 1393 | |
| SEQ ID: | ATGGACGACGACGACAAGccatctggattagactAAAAAAAAAAAAAAAAAAAAAAA*A*A |
| 1394 | |
| SEQ ID: | ATGGACGACGACGACAAGgatgcgaagcgcatacAAAAAAAAAAAAAAAAAAAAAAA*A*A |
| 1395 | |
| SEQ ID: | ATGGACGACGACGACAAGcataccacgcctatgtAAAAAAAAAAAAAAAAAAAAAAA*A*A |
| 1396 | |
| SEQ ID: | ATGGACGACGACGACAAGgaagtggtcttcaggtAAAAAAAAAAAAAAAAAAAAAAA*A*A |
| 1397 | |
| SEQ ID: | ATGGACGACGACGACAAGtcgctgagccgcaaatAAAAAAAAAAAAAAAAAAAAAAA*A*A |
| 1398 | |
| SEQ ID: | ATGGACGACGACGACAAGttatggagcctgttcgAAAAAAAAAAAAAAAAAAAAAAA*A*A |
| 1399 | |
| SEQ ID: | ATGGACGACGACGACAAGgaagcccataggaggtAAAAAAAAAAAAAAAAAAAAAAA*A*A |
| 1400 | |
| SEQ ID: | ATGGACGACGACGACAAGgccgtgacagtggtttAAAAAAAAAAAAAAAAAAAAAAA*A*A |
| 1401 | |
| SEQ ID: | ATGGACGACGACGACAAGaagtcgacctctatcgAAAAAAAAAAAAAAAAAAAAAAA*A*A |
| 1402 | |
| SEQ ID: | ATGGACGACGACGACAAGcattgactttcgagcgAAAAAAAAAAAAAAAAAAAAAAA*A*A |
| 1403 | |
| SEQ ID: | ATGGACGACGACGACAAGattaaacagggagctgAAAAAAAAAAAAAAAAAAAAAAA*A*A |
| 1404 | |
| SEQ ID: | ATGGACGACGACGACAAGacaatccgaggtctgaAAAAAAAAAAAAAAAAAAAAAAA*A*A |
| 1405 | |
| SEQ ID: | ATGGACGACGACGACAAGgaagggcaaggtttctAAAAAAAAAAAAAAAAAAAAAAA*A*A |
| 1406 | |
| SEQ ID: | ATGGACGACGACGACAAGgtggaaaaccgagataAAAAAAAAAAAAAAAAAAAAAAA*A*A |
| 1407 | |
| SEQ ID: | ATGGACGACGACGACAAGaccattactcgtaagcAAAAAAAAAAAAAAAAAAAAAAA*A*A |
| 1408 | |
| SEQ ID: | ATGGACGACGACGACAAGcgtccgatgacctcttAAAAAAAAAAAAAAAAAAAAAAA*A*A |
| 1409 | |
| SEQ ID: | ATGGACGACGACGACAAGtgtggcgcttacaaacAAAAAAAAAAAAAAAAAAAAAAA*A*A |
| 1410 | |
| SEQ ID: | ATGGACGACGACGACAAGattcacatgtgcaggaAAAAAAAAAAAAAAAAAAAAAAA*A*A |
| 1411 | |
| SEQ ID: | ATGGACGACGACGACAAGctaccacacaagctccAAAAAAAAAAAAAAAAAAAAAAA*A*A |
| 1412 | |
| SEQ ID: | ATGGACGACGACGACAAGggatggtaattcgcttAAAAAAAAAAAAAAAAAAAAAAA*A*A |
| 1413 | |
| SEQ ID: | ATGGACGACGACGACAAGttcaaaggtttgacgcAAAAAAAAAAAAAAAAAAAAAAA*A*A |
| 1414 | |
| SEQ ID: | ATGGACGACGACGACAAGgtctgcagcaatctctAAAAAAAAAAAAAAAAAAAAAAA*A*A |
| 1415 | |
| SEQ ID: | ATGGACGACGACGACAAGgacagtcgtaactgggAAAAAAAAAAAAAAAAAAAAAAA*A*A |
| 1416 | |
| SEQ ID: | ATGGACGACGACGACAAGagtgcttgtaaagagcAAAAAAAAAAAAAAAAAAAAAAA*A*A |
| 1417 | |
| SEQ ID: | ATGGACGACGACGACAAGgtaggagctgcctttgAAAAAAAAAAAAAAAAAAAAAAA*A*A |
| 1418 | |
| SEQ ID: | ATGGACGACGACGACAAGccactttcgtagacatAAAAAAAAAAAAAAAAAAAAAAA*A*A |
| 1419 | |
| SEQ ID: | ATGGACGACGACGACAAGtgattagcgtggttacAAAAAAAAAAAAAAAAAAAAAAA*A*A |
| 1420 | |
| SEQ ID: | ATGGACGACGACGACAAGaaaggcagtaagaaccAAAAAAAAAAAAAAAAAAAAAAA*A*A |
| 1421 | |
| SEQ ID: | ATGGACGACGACGACAAGcgtagtttagggcccaAAAAAAAAAAAAAAAAAAAAAAA*A*A |
| 1422 | |
| SEQ ID: | ATGGACGACGACGACAAGgtcataatcccgttccAAAAAAAAAAAAAAAAAAAAAAA*A*A |
| 1423 | |
| SEQ ID: | ATGGACGACGACGACAAGttgatacgttccctggAAAAAAAAAAAAAAAAAAAAAAA*A*A |
| 1424 | |
| SEQ ID: | ATGGACGACGACGACAAGaacgataggatcgcgaAAAAAAAAAAAAAAAAAAAAAAA*A*A |
| 1425 | |
| SEQ ID: | ATGGACGACGACGACAAGagaatttagggcgcctAAAAAAAAAAAAAAAAAAAAAAA*A*A |
| 1426 | |
| SEQ ID: | ATGGACGACGACGACAAGctagcatttagacccaAAAAAAAAAAAAAAAAAAAAAAA*A*A |
| 1427 | |
| SEQ ID: | ATGGACGACGACGACAAGaccgtttgacggtttgAAAAAAAAAAAAAAAAAAAAAAA*A*A |
| 1428 | |
| SEQ ID: | ATGGACGACGACGACAAGgtggtagcatgctagcAAAAAAAAAAAAAAAAAAAAAAA*A*A |
| 1429 | |
| SEQ ID: | ATGGACGACGACGACAAGctgtttcgtaccagtcAAAAAAAAAAAAAAAAAAAAAAA*A*A |
| 1430 | |
| SEQ ID: | ATGGACGACGACGACAAGattacgtccgagagagAAAAAAAAAAAAAAAAAAAAAAA*A*A |
| 1431 | |
| SEQ ID: | ATGGACGACGACGACAAGggacttattcgacactAAAAAAAAAAAAAAAAAAAAAAA*A*A |
| 1432 | |
| SEQ ID: | ATGGACGACGACGACAAGccattgacaggacgagAAAAAAAAAAAAAAAAAAAAAAA*A*A |
| 1433 | |
| SEQ ID: | ATGGACGACGACGACAAGagcgtgaaatcgtgctAAAAAAAAAAAAAAAAAAAAAAA*A*A |
| 1434 | |
| SEQ ID: | ATGGACGACGACGACAAGctggttataaggggttAAAAAAAAAAAAAAAAAAAAAAA*A*A |
| 1435 | |
| SEQ ID: | ATGGACGACGACGACAAGctgcgcatccgtactaAAAAAAAAAAAAAAAAAAAAAAA*A*A |
| 1436 | |
| SEQ ID: | ATGGACGACGACGACAAGatcccacagcctaatgAAAAAAAAAAAAAAAAAAAAAAA*A*A |
| 1437 | |
| SEQ ID: | ATGGACGACGACGACAAGatgcgtaatcaggaacAAAAAAAAAAAAAAAAAAAAAAA*A*A |
| 1438 | |
| SEQ ID: | ATGGACGACGACGACAAGacgccgtgaactgaacAAAAAAAAAAAAAAAAAAAAAAA*A*A |
| 1439 | |
| SEQ ID: | ATGGACGACGACGACAAGatagcccggcaatgcaAAAAAAAAAAAAAAAAAAAAAAA*A*A |
| 1440 | |
| SEQ ID: | ATGGACGACGACGACAAGcacctcaaagtcagccAAAAAAAAAAAAAAAAAAAAAAA*A*A |
| 1441 | |
| SEQ ID: | ATGGACGACGACGACAAGttccaaggacgtggaaAAAAAAAAAAAAAAAAAAAAAAA*A*A |
| 1442 | |
| SEQ ID: | ATGGACGACGACGACAAGagagagatgctaaccgAAAAAAAAAAAAAAAAAAAAAAA*A*A |
| 1443 | |
| SEQ ID: | ATGGACGACGACGACAAGgttccggaactgtcctAAAAAAAAAAAAAAAAAAAAAAA*A*A |
| 1444 | |
| SEQ ID: | ATGGACGACGACGACAAGggatggtcctgaatccAAAAAAAAAAAAAAAAAAAAAAA*A*A |
| 1445 | |
| SEQ ID: | ATGGACGACGACGACAAGattttggcggtgggtcAAAAAAAAAAAAAAAAAAAAAAA*A*A |
| 1446 | |
| SEQ ID: | ATGGACGACGACGACAAGaatcgattgcgtacggAAAAAAAAAAAAAAAAAAAAAAA*A*A |
| 1447 | |
| SEQ ID: | ATGGACGACGACGACAAGtggagccgttattacgAAAAAAAAAAAAAAAAAAAAAAA*A*A |
| 1448 | |
| SEQ ID: | ATGGACGACGACGACAAGaggcattgtgactggtAAAAAAAAAAAAAAAAAAAAAAA*A*A |
| 1449 | |
| SEQ ID: | ATGGACGACGACGACAAGgactgctgtccaaaatAAAAAAAAAAAAAAAAAAAAAAA*A*A |
| 1450 | |
| SEQ ID: | ATGGACGACGACGACAAGccctttgcgtcccattAAAAAAAAAAAAAAAAAAAAAAA*A*A |
| 1451 | |
| SEQ ID: | ATGGACGACGACGACAAGttgcaagcggctaccaAAAAAAAAAAAAAAAAAAAAAAA*A*A |
| 1452 | |
| SEQ ID: | ATGGACGACGACGACAAGttggcgcatttatcggAAAAAAAAAAAAAAAAAAAAAAA*A*A |
| 1453 | |
| SEQ ID: | ATGGACGACGACGACAAGcaacatcttaggtctcAAAAAAAAAAAAAAAAAAAAAAA*A*A |
| 1454 | |
| SEQ ID: | ATGGACGACGACGACAAGgtaatccgtcaggagtAAAAAAAAAAAAAAAAAAAAAAA*A*A |
| 1455 | |
| SEQ ID: | ATGGACGACGACGACAAGcactgtcacgtacacaAAAAAAAAAAAAAAAAAAAAAAA*A*A |
| 1456 | |
| SEQ ID: | ATGGACGACGACGACAAGggtgaggggatagtaaAAAAAAAAAAAAAAAAAAAAAAA*A*A |
| 1457 | |
| SEQ ID: | ATGGACGACGACGACAAGatgggcacatattctcAAAAAAAAAAAAAAAAAAAAAAA*A*A |
| 1458 | |
| SEQ ID: | ATGGACGACGACGACAAGaaaacgcctatcactcAAAAAAAAAAAAAAAAAAAAAAA*A*A |
| 1459 | |
| SEQ ID: | ATGGACGACGACGACAAGctctctttgatccgtaAAAAAAAAAAAAAAAAAAAAAAA*A*A |
| 1460 | |
| SEQ ID: | ATGGACGACGACGACAAGcttacgaggctaccgaAAAAAAAAAAAAAAAAAAAAAAA*A*A |
| 1461 | |
| SEQ ID: | ATGGACGACGACGACAAGtgtctagctgaggcaaAAAAAAAAAAAAAAAAAAAAAAA*A*A |
| 1462 | |
| SEQ ID: | ATGGACGACGACGACAAGgtaggacagatccgcaAAAAAAAAAAAAAAAAAAAAAAA*A*A |
| 1463 | |
| SEQ ID: | ATGGACGACGACGACAAGgtacccatgtcttaacAAAAAAAAAAAAAAAAAAAAAAA*A*A |
| 1464 | |
| SEQ ID: | ATGGACGACGACGACAAGagacctctcggtgaatAAAAAAAAAAAAAAAAAAAAAAA*A*A |
| 1465 | |
| SEQ ID: | ATGGACGACGACGACAAGgggtcgattcacttgaAAAAAAAAAAAAAAAAAAAAAAA*A*A |
| 1466 | |
| SEQ ID: | ATGGACGACGACGACAAGtcgatacgccaaggtgAAAAAAAAAAAAAAAAAAAAAAA*A*A |
| 1467 | |
| SEQ ID: | ATGGACGACGACGACAAGtgtttgtagccgcctgAAAAAAAAAAAAAAAAAAAAAAA*A*A |
| 1468 | |
| SEQ ID: | ATGGACGACGACGACAAGaattctgcctcctcaaAAAAAAAAAAAAAAAAAAAAAAA*A*A |
| 1469 | |
| SEQ ID: | ATGGACGACGACGACAAGctccgaaaagttgcagAAAAAAAAAAAAAAAAAAAAAAA*A*A |
| 1470 | |
| SEQ ID: | ATGGACGACGACGACAAGaagccggtcatagcctAAAAAAAAAAAAAAAAAAAAAAA*A*A |
| 1471 | |
| SEQ ID: | ATGGACGACGACGACAAGcatcagtaggtgacgcAAAAAAAAAAAAAAAAAAAAAAA*A*A |
| 1472 | |
| SEQ ID: | ATGGACGACGACGACAAGaatcggcgcattgggaAAAAAAAAAAAAAAAAAAAAAAA*A*A |
| 1473 | |
| SEQ ID: | ATGGACGACGACGACAAGgaaattgaggtcctgcAAAAAAAAAAAAAAAAAAAAAAA*A*A |
| 1474 | |
| SEQ ID: | ATGGACGACGACGACAAGacctgcgtgactcttgAAAAAAAAAAAAAAAAAAAAAAA*A*A |
| 1475 | |
| SEQ ID: | ATGGACGACGACGACAAGgcgcgggtaatcatacAAAAAAAAAAAAAAAAAAAAAAA*A*A |
| 1476 | |
| SEQ ID: | ATGGACGACGACGACAAGtcttaggctttcgtgcAAAAAAAAAAAAAAAAAAAAAAA*A*A |
| 1477 | |
| SEQ ID: | ATGGACGACGACGACAAGccgaagacactgtcgtAAAAAAAAAAAAAAAAAAAAAAA*A*A |
| 1478 | |
| SEQ ID: | ATGGACGACGACGACAAGtcatttccccgcctctAAAAAAAAAAAAAAAAAAAAAAA*A*A |
| 1479 | |
| SEQ ID: | ATGGACGACGACGACAAGccttgtgcgtatgtaaAAAAAAAAAAAAAAAAAAAAAAA*A*A |
| 1480 | |
| SEQ ID: | ATGGACGACGACGACAAGtgcgttggtctaaaggAAAAAAAAAAAAAAAAAAAAAAA*A*A |
| 1481 | |
| SEQ ID: | ATGGACGACGACGACAAGccctactaacaatgtcAAAAAAAAAAAAAAAAAAAAAAA*A*A |
| 1482 | |
| SEQ ID: | ATGGACGACGACGACAAGtcctcttagcttgggcAAAAAAAAAAAAAAAAAAAAAAA*A*A |
| 1483 | |
| SEQ ID: | ATGGACGACGACGACAAGctcttacccgcgataaAAAAAAAAAAAAAAAAAAAAAAA*A*A |
| 1484 | |
| SEQ ID: | ATGGACGACGACGACAAGtctgttgggttgtccgAAAAAAAAAAAAAAAAAAAAAAA*A*A |
| 1485 | |
| SEQ ID: | ATGGACGACGACGACAAGagaagtggtcttagacAAAAAAAAAAAAAAAAAAAAAAA*A*A |
| 1486 | |
| SEQ ID: | ATGGACGACGACGACAAGtcagaacaagtcatgcAAAAAAAAAAAAAAAAAAAAAAA*A*A |
| 1487 | |
| SEQ ID: | ATGGACGACGACGACAAGaatccatcggccagtaAAAAAAAAAAAAAAAAAAAAAAA*A*A |
| 1488 | |
| SEQ ID: | ATGGACGACGACGACAAGtcatcagaagcggaagAAAAAAAAAAAAAAAAAAAAAAA*A*A |
| 1489 | |
| SEQ ID: | ATGGACGACGACGACAAGcgttaggttggactacAAAAAAAAAAAAAAAAAAAAAAA*A*A |
| 1490 | |
| SEQ ID: | ATGGACGACGACGACAAGgattagcatcccgaggAAAAAAAAAAAAAAAAAAAAAAA*A*A |
| 1491 | |
| SEQ ID: | ATGGACGACGACGACAAGtacctgaatagtcacgAAAAAAAAAAAAAAAAAAAAAAA*A*A |
| 1492 | |
| SEQ ID: | ATGGACGACGACGACAAGagaaccgcatgtcaccAAAAAAAAAAAAAAAAAAAAAAA*A*A |
| 1493 | |
| SEQ ID: | ATGGACGACGACGACAAGcgattcatatggaccgAAAAAAAAAAAAAAAAAAAAAAA*A*A |
| 1494 | |
| SEQ ID: | ATGGACGACGACGACAAGgaacgaggcctattgtAAAAAAAAAAAAAAAAAAAAAAA*A*A |
| 1495 | |
| SEQ ID: | ATGGACGACGACGACAAGtgggagatatgtaaccAAAAAAAAAAAAAAAAAAAAAAA*A*A |
| 1496 | |
| SEQ ID: | ATGGACGACGACGACAAGttctgaaaacgaagccAAAAAAAAAAAAAAAAAAAAAAA*A*A |
| 1497 | |
| SEQ ID: | ATGGACGACGACGACAAGagtctctttatgacccAAAAAAAAAAAAAAAAAAAAAAA*A*A |
| 1498 | |
| SEQ ID: | ATGGACGACGACGACAAGgagctagtaagacgccAAAAAAAAAAAAAAAAAAAAAAA*A*A |
| 1499 | |
| SEQ ID: | ATGGACGACGACGACAAGaccggtccttcgactaAAAAAAAAAAAAAAAAAAAAAAA*A*A |
| 1500 | |
| SEQ ID: | ATGGACGACGACGACAAGaaatgacgggcgtcacAAAAAAAAAAAAAAAAAAAAAAA*A*A |
| 1501 | |
| SEQ ID: | ATGGACGACGACGACAAGtctcggacccaatcctAAAAAAAAAAAAAAAAAAAAAAA*A*A |
| 1502 | |
| SEQ ID: | ATGGACGACGACGACAAGccatggatcaaaggccAAAAAAAAAAAAAAAAAAAAAAA*A*A |
| 1503 | |
| SEQ ID: | ATGGACGACGACGACAAGtcggtatgtgaatcccAAAAAAAAAAAAAAAAAAAAAAA*A*A |
| 1504 | |
| SEQ ID: | ATGGACGACGACGACAAGggttcatgatcgtatcAAAAAAAAAAAAAAAAAAAAAAA*A*A |
| 1505 | |
| SEQ ID: | ATGGACGACGACGACAAGtaagattctccccttcAAAAAAAAAAAAAAAAAAAAAAA*A*A |
| 1506 | |
| SEQ ID: | ATGGACGACGACGACAAGaaatctaactgccgtgAAAAAAAAAAAAAAAAAAAAAAA*A*A |
| 1507 | |
| SEQ ID: | ATGGACGACGACGACAAGtactgatcatttccgcAAAAAAAAAAAAAAAAAAAAAAA*A*A |
| 1508 | |
| SEQ ID: | ATGGACGACGACGACAAGgtaggatcacggcgttAAAAAAAAAAAAAAAAAAAAAAA*A*A |
| 1509 | |
| SEQ ID: | ATGGACGACGACGACAAGcttgatgtcgtcaatcAAAAAAAAAAAAAAAAAAAAAAA*A*A |
| 1510 | |
| SEQ ID: | ATGGACGACGACGACAAGggaagtctagcgagtcAAAAAAAAAAAAAAAAAAAAAAA*A*A |
| 1511 | |
| SEQ ID: | ATGGACGACGACGACAAGtctctgctcgaggagtAAAAAAAAAAAAAAAAAAAAAAA*A*A |
| 1512 | |
| SEQ ID: | ATGGACGACGACGACAAGctttgcacgagagccaAAAAAAAAAAAAAAAAAAAAAAA*A*A |
| 1513 | |
| SEQ ID: | ATGGACGACGACGACAAGactttaccaatggcgaAAAAAAAAAAAAAAAAAAAAAAA*A*A |
| 1514 | |
| SEQ ID: | ATGGACGACGACGACAAGgcagaatagcgactcgAAAAAAAAAAAAAAAAAAAAAAA*A*A |
| 1515 | |
| SEQ ID: | ATGGACGACGACGACAAGcgaacgttgcgtttggAAAAAAAAAAAAAAAAAAAAAAA*A*A |
| 1516 | |
| SEQ ID: | ATGGACGACGACGACAAGtgaagtctcgaagtgaAAAAAAAAAAAAAAAAAAAAAAA*A*A |
| 1517 | |
| SEQ ID: | ATGGACGACGACGACAAGcccttgggcataaaacAAAAAAAAAAAAAAAAAAAAAAA*A*A |
| 1518 | |
| SEQ ID: | ATGGACGACGACGACAAGggctagcagttgagtgAAAAAAAAAAAAAAAAAAAAAAA*A*A |
| 1519 | |
| SEQ ID: | ATGGACGACGACGACAAGatgggctatggtggtaAAAAAAAAAAAAAAAAAAAAAAA*A*A |
| 1520 | |
| SEQ ID: | ATGGACGACGACGACAAGtaccactaggaatcagAAAAAAAAAAAAAAAAAAAAAAA*A*A |
| 1521 | |
| SEQ ID: | ATGGACGACGACGACAAGacataggggcattgagAAAAAAAAAAAAAAAAAAAAAAA*A*A |
| 1522 | |
| SEQ ID: | ATGGACGACGACGACAAGgttcatagatagcgcaAAAAAAAAAAAAAAAAAAAAAAA*A*A |
| 1523 | |
| SEQ ID: | ATGGACGACGACGACAAGtggctttcctaacagcAAAAAAAAAAAAAAAAAAAAAAA*A*A |
| 1524 | |
| SEQ ID: | ATGGACGACGACGACAAGgaagcgtccatatgacAAAAAAAAAAAAAAAAAAAAAAA*A*A |
| 1525 | |
| SEQ ID: | ATGGACGACGACGACAAGcacaagcgactctttcAAAAAAAAAAAAAAAAAAAAAAA*A*A |
| 1526 | |
| SEQ ID: | ATGGACGACGACGACAAGaagatattccgcgtgcAAAAAAAAAAAAAAAAAAAAAAA*A*A |
| 1527 | |
| SEQ ID: | ATGGACGACGACGACAAGgtccaaatcacaccgtAAAAAAAAAAAAAAAAAAAAAAA*A*A |
| 1528 | |
| SEQ ID: | ATGGACGACGACGACAAGgacgtcatcgtacctgAAAAAAAAAAAAAAAAAAAAAAA*A*A |
| 1529 | |
| SEQ ID: | ATGGACGACGACGACAAGacagctgctgtgcatcAAAAAAAAAAAAAAAAAAAAAAA*A*A |
| 1530 | |
| SEQ ID: | ATGGACGACGACGACAAGttgtaacagtgcaacgAAAAAAAAAAAAAAAAAAAAAAA*A*A |
| 1531 | |
| SEQ ID: | ATGGACGACGACGACAAGagctgttatgcgccgtAAAAAAAAAAAAAAAAAAAAAAA*A*A |
| 1532 | |
| SEQ ID: | ATGGACGACGACGACAAGttgcccaaaaccctgtAAAAAAAAAAAAAAAAAAAAAAA*A*A |
| 1533 | |
| SEQ ID: | ATGGACGACGACGACAAGagctaagtcgctggtaAAAAAAAAAAAAAAAAAAAAAAA*A*A |
| 1534 | |
| SEQ ID: | ATGGACGACGACGACAAGtcctgtaattacgcctAAAAAAAAAAAAAAAAAAAAAAA*A*A |
| 1535 | |
| SEQ ID: | ATGGACGACGACGACAAGcgcctgatcctttgagAAAAAAAAAAAAAAAAAAAAAAA*A*A |
| 1536 | |
| SEQ ID: | ATGGACGACGACGACAAGacctctgtcgagttacAAAAAAAAAAAAAAAAAAAAAAA*A*A |
| 1537 | |
| SEQ ID: | ATGGACGACGACGACAAGgacgttgtagcaggatAAAAAAAAAAAAAAAAAAAAAAA*A*A |
| 1538 | |
| SEQ ID: | ATGGACGACGACGACAAGatggctcaacgaggagAAAAAAAAAAAAAAAAAAAAAAA*A*A |
| 1539 | |
| SEQ ID: | ATGGACGACGACGACAAGagaggtacatgagaggAAAAAAAAAAAAAAAAAAAAAAA*A*A |
| 1540 | |
| SEQ ID: | ATGGACGACGACGACAAGtgacagcccatctcgtAAAAAAAAAAAAAAAAAAAAAAA*A*A |
| 1541 | |
| SEQ ID: | ATGGACGACGACGACAAGtgacaacgccatgtctAAAAAAAAAAAAAAAAAAAAAAA*A*A |
| 1542 | |
| SEQ ID: | ATGGACGACGACGACAAGgggttacaacgtatagAAAAAAAAAAAAAAAAAAAAAAA*A*A |
| 1543 | |
| SEQ ID: | ATGGACGACGACGACAAGcatacgatcacggacgAAAAAAAAAAAAAAAAAAAAAAA*A*A |
| 1544 | |
| SEQ ID: | ATGGACGACGACGACAAGtaccccggctatcaacAAAAAAAAAAAAAAAAAAAAAAA*A*A |
| 1545 | |
| SEQ ID: | ATGGACGACGACGACAAGatgaaactcaccgcaaAAAAAAAAAAAAAAAAAAAAAAA*A*A |
| 1546 | |
| SEQ ID: | ATGGACGACGACGACAAGcctatatccattcctgAAAAAAAAAAAAAAAAAAAAAAA*A*A |
| 1547 | |
| SEQ ID: | ATGGACGACGACGACAAGtagcattaacagcgtgAAAAAAAAAAAAAAAAAAAAAAA*A*A |
| 1548 | |

[0197] Libraries are then prepared from the digested products using a modified NEXTERA® XT protocol in which custom primers designed to enrich 3′ end are used. The libraries are then sequenced using an ILLUMINA® platform. Gene expression can then be analyzed by determining the total amount of each of the RNAs present, for each cellular barcode present.

[0198] The present methods provide several advantages over previous methods. For example, by using a 384-well PCR plate the reaction volume is decreased (e.g., the volume decreased from 10 μL to 5 μL for reverse transcription and from 25 μL to 10 μL for PCR). Further, by using a restriction enzyme, the current method allows for recovery of about 80-90%, such as 85%, 3′ end sequences that have cell barcode information; a much higher recovery rate compared with other 3′ end selection methods (Table 11).

### VI. Single Cell Gene Expression Analysis, Single Cell RNA Sequencing, and DNA-Labeled Antibody Sequencing

[0199] The present methods for the generation of peptide antigens by IVTT using synthesized oligo nucleotides as the template, which are then loaded to MHC monomers and form DNA-BC pMHC tetramers to stain and sort T cells, can also be combined with single cell gene expression analysis platforms, such as BD RHAPSODY™ Single-Cell Analysis System, or single cell RNA sequencing (scRNA-seq) platforms, such as lOX genomics CHROMIUM® or 1CELLBIO® INDROP® or DOLOMITE® Bio Nadia. In addition, methods described here can be combined with DNA-labeled antibody sequencing, such as CITE-seq or REAP-seq (Stoeckius et al., 2017) or the commercially available DNA-labeled antibodies, such as BD Ab-seq products or BIOLEGEND® TotalSeq (FIGS. 23-28, Table 1). The method that includes the TetTCR-Seq, single cell gene expression or scRNA-seq, and DNA-labeled antibody sequencing is referred to herein as TetTCR-SeqHD.

[0200] TetTCR-SeqHD methods described here can use peptide encoding oligos desgined in the TetTCR-Seq or peptide encoding oligos with poly A tail added to the 3′end to interface with scRNA-seq protocols that high-throughput scRNA-seq platforms use. A DNA linker oligonucleotide may be used to covalentely linked to streptavidin in order to complementary bind peptide-encoding DNA oligonucleotide. This design makes it possible for only annealing to be required to link the peptide-encoding DNA oligonucleotide to the streptavidin. MID or UMI and cell barcodes from high-throught platforms during reverse transcription may be used. Reverse transcription using primers containing polyT in above single cell analysis platforms can generate cDNA of peptide-encoding DNA oligonucleotide for each individual cell. Reverse transcription part of TetTCR-SeqHD is compatible with single cell RNA sequencing protocols, such as SMART-SEQ® and SMART-SEQ2© protocols (Ramskold et al., 2012).

### VII. Examples

[0201] The following examples are included to demonstrate preferred embodiments of the invention. It should be appreciated by those of skill in the art that the techniques disclosed in the examples which follow represent techniques discovered by the inventor to function well in the practice of the invention, and thus can be considered to constitute preferred modes for its practice. However, those of skill in the art should, in light of the present disclosure, appreciate that many changes can be made in the specific embodiments which are disclosed and still obtain a like or similar result without departing from the spirit and scope of the invention.

### Example 1

### Materials and Methods

[0202] PE/APC-labeled streptavidin conjugation to DNA Linker—Conjugation of a DNA linker comprising a MID sequence (Table 1) to Phycoerythrin (PE)- and Allophycocyanin (APC)-labeled streptavidin was performed following manufacturer's protocols (SoluLink®). Excess unconjugated DNA linker was removed by 6 wash steps in a Vivaspin® 6 100 kDa protein concentrator (GE® Healthcare). Conjugates were concentrated to ˜120 μl, and then passed through a 0.2 μm centrifugal filter. The molar DNA:protein conjugation ratio was kept between 1:3 to 1:7.

[0203] DNA:protein conjugation ratio was determined by absorbance using a 1 mg/ml of PE or APC-labeled streptavidin reference solution. The absorbance of the DNA-streptavidin conjugate was then compared with this standard curve to determine the effective protein concentration of the conjugate. The DNA concentration was determined from the difference in the A260 absorbance between the DNA-streptavidin conjugate and a protein concentration-matched version of the PE/APC streptavidin.

[0204] Overlap extension of the DNA-streptavidin conjugate—Annealing of DNA template to DNA-streptavidin conjugate was done at 55° C. for 5 minutes, then cooled to 25° C. at −0.1° C./s in the presence of 250 μM dNTP in 1× CutSmart® buffer (NEB®). Then, 1 μl of extension mixture consisting of 0.1 μl CutSmart® 10×, and 0.125 μl Klenow Fragment Exo-(5 U/ul, NEB) was added before starting the extension at 37° C. for 1 hour. The reaction is stopped by adding EDTA. The extended DNA-streptavidin conjugate was stored at 4° C. These steps correspond to steps 2.1 and 2.2 in FIG. 1A.

[0205] In vitro transcription/translation—Peptide-encoding DNA templates were purchased from IDT and SIGMA-ALDRICH®. DNA templates were amplified in a 10 μl PCR reaction with 400 μM dNTP, 1 μM IVTT forward primer (Table 1), 1.05 μM IVTT reverse primer (Table 1), 25 μM DNA template, and 0.0375 U/μl TaKaRa Ex Taq® HS DNA Polymerase (TAKARA BIO USA®). The reaction proceeded for 95° C. 3 min, then 30 cycles of 95° C. 20 s, 52° C. 40 s, 72° C. 45 s, then 72° C. 5 min. The PCR product was diluted with 73.3 μl of water. Corresponds to step 1.1 in FIG. 1A.

[0206] 20 μl of 1.5× concentrated PUREXPRESS® IVTT master mix (NEW ENGLAND BIOLABS®) consists of 10 μl Solution A, 7.5 μl solution B, 0.8 μl of Release Factor 1+2+3 (5 reaction/μl, NEB special order), 0.25 μl enterokinase (16 U/μl, NEB), 0.25 μl Murine RNase Inhibitor (40 U/ul, NEB), and 1.2 μl H₂O. 1 μl of the diluted PCR product was added to 2 μl of the IVTT master mix on ice and then incubated at 30° C. for 4 hours. This step corresponds to step 1.2 in FIG. 1A.

[0207] pMHC UV exchange and tetramerization—pMHC UV exchange and tetramerization follows previously described protocol (Rodenko et al., Yu et al., 2015). The UV exchange was performed for 60 minutes on ice, and then incubated at 4° C. for at least 12 hours. Extended DNA-streptavidin conjugate was then added to its corresponding UV-exchanged pMHC monomer mix at molar ratio of 1:6.7 and incubated at 4° C. for 1 hour to generate DNA pMHC tetramers. This step corresponds to step 1.3 in FIG. 1A.

[0208] DNA pMHC tetramer pooling—500 μl of staining buffer (PBS, 5 mM EDTA, 2% FBS, 100 μg/ml salmon sperm DNA, 100 μM d-biotin, 0.05% sodium azide) was added to a 100 kDa VIVASPIN® protein concentrator (GE®) and incubated for at least 30 minutes. The concentrator is spun at 10,000 g and further staining buffer is added until 1 ml of solution have run through the membrane. Immediately prior to cell staining, 0.65 μl of each DNA pMHC tetramer is added to 400 μl of staining buffer, transferred to the concentrator, and then spun at 7,000 g for 10 minutes or longer until the volume reaches ˜50 μl.

[0209] DNA pMHC tetramer staining and sorting of T cells—Human Leukocyte Reduction System (LRS) chambers were obtained from de-identified donors by staff members at We Are Blood. The use of LRS chamber from de-identified donors for this study was approved by the Institutional Review Board of the University of Texas at Austin and was complied with all ethical regulations. CD8⁺ T cell isolation was performed following a previously established protocol (Yu et al., 2015).

[0210] Cells were resuspended into staining buffer containing ˜60 nM of each DNA-BC pMHC tetramer and 0.025 mg/ml of BV785-CD8a (RPA-T8) antibody and incubated for 1 hour at 4° C. In experiments 1 and 2, a HCV-KLV(WT) binding clone was pre-stained with BV605-CD8a and then spiked into the main sample. Tetramer enrichment was performed either on ice or at 4° C. following published protocol (Yu et al., 2015).

[0211] The enriched fraction was eluted off the column and washed into FACS buffer with 0.05% sodium azide, and stained with AF488-CD3, 7-AAD, BV421-CCR7, BV510-CD45RA, and BV785-CD8a (BIOLEGEND®). Single cells were sorted using BD FACSARIA™ II into 4 μl lysis buffer following previously published protocol (Zhang et al., 2016).

[0212] T cell receptor and DNA-BC sequencing library preparation—Single cell TCR amplification and sequencing was done following published protocol with a minor modification (Zhang et al., 2016). During the first PCR amplification, primers P1 and P2 (SEQ ID NOs: 4-5) were included in the primer mix at 100 nM final concentration for concurrent amplification of TCR and the DNA-BC from the DNA pMHC tetramer (Table 2).

[0213] 1 μl of first PCR product from the TCR and DNA-BC amplification was combined with 100 nM of a V1f_rxn2 primer (Table 1) and 100 nM of a V1r_rxn2 primer from Table 1, and 0.025 U/μl TAKARA EX TAQ® HS (TAKARA BIO USA®) to 5 μl volume for a second PCR. PCR proceeded at 95° C. 3 minutes, then 10 cycles of 95° C. 20 sec, 55° C. 40 sec, and 72° C. 45 sec, then 72° C. 5 min. These PCR primers include cell barcodes to discriminate between wells, and include partial ILLUMINA® adaptor as previously described (Zhang et al., 2016).

[0214] A third PCR was used to add the remaining ILLUMINA® sequencing adaptors using ILLU_f and ILLU_r primers (Table 1). This PCR was identical to that of the prior, except that it only used 5 cycles. Multiple wells are then pooled and purified by gel electrophoresis and gel extraction. Libraries were sequenced on the ILUMINA® MISEQ® using the V2 kit. The libraries were sequenced to a depth of at least 6000 reads/cell.

[0215] DNA-BC sequence processing—Raw reads were filtered based on the constant region of the DNA-BC. Reads were further separated according to cell barcodes. Within each cell barcode, reads with an identical MID sequence were clustered together and a consensus peptide-encoding sequence was built for each cluster. Each cluster represents one MID count.

[0216] Clusters were filtered based on the peptide-encoding region to be 25-30 nt in length, and with a Levenshtein distance no greater than 2 from the nearest known DNA-BC sequence. A histogram was then created expressing the % of total reads belonging to each group of clusters sharing the same read count. Low read count clusters, which occur due to sequencing errors, were removed (FIG. 9) (Fu et al., 2014). The clusters are then collected into their corresponding cell and peptide based on the cell barcode and peptide-encoding DNA sequence, respectively.

[0217] Calculation of percent cross-reactive T cells for Experiment 3-6: The relative proportion of T cells belonging to the Neo⁺WT⁺, Neo⁻WT⁺, and Neo⁺WT⁻ antigen-binding cell populations was calculated for each Neo-WT antigen pair using cells with positive antigen detection. The analysis was restricted to cells with the one identified antigen in the Neo⁻WT⁺ and Neo⁺WT⁻ sorted populations and the two identified antigens in the Neo⁺WT⁺ sorted population (FIGS. 113E, 15E, 18I). From this dataset, normalization was performed to account for differences in the frequency and number of cells sorted for the three cell populations. Taking these two normalizations into account, the equation for calculating the relative proportion p of cells binding to peptide a in population b for Experiment 3-4 is:

$$p ( {a}_{i} , {b}_{j} ) = \frac{relfreq ( {b}_{j} ) * \frac{count ( {a}_{i} , {b}_{j} )}{totalsort ( {b}_{j} )}}{{\sum }_{b}^{} \frac{relfreq ( b ) count ( {a}_{i} , b )}{totalsort ( b )}}$$

[0218] aᵢ refers to a Neo-WT antigen pair in the Neo⁺WT⁺ population, corresponding WT peptide only in the Neo⁻WT⁺ population, and corresponding Neo peptide only in the Neo⁺WT⁻ population. bⱼ refers to one of the three cell populations Neo⁺WT⁻, Neo⁻WT⁺, or Neo⁺WT⁺. count(aᵢ,bⱼ) refers to the antigen-binding T cell count in cell population bⱼ binding to peptide aᵢ. Relfreq(bⱼ) refers to the percentage of cell population bⱼ taken from the tetramer gating in the tetramer-enriched fraction, which is a measure of the relative cell frequency (FIG. 112A). totalsort(bⱼ) is the total number of cells sorted for cell population bⱼ.

[0219] The percent cross reactive T cells for any Neo-WT antigen pair ai is simply p(aᵢ,b_{Neo+WT+}) (same values as red bars in FIG. 2B). While this calculation can be performed for all Neo-WT antigen pairs, the analysis was restricted to Neo-WT antigen pairs containing at least 3 cells where both the Neo and WT antigen were detected in at least one cell.

[0220] An aggregate analysis was performed for experiment 5-6. Since cells are aggregated from these two experiments, the cell counts were normalized in the three Tetramer⁺ populations but not the cell frequency because the relative frequency of the three cell populations in both experiments were comparable between one another. The altered equation used for Experiment 5-6 is the following:

$$p ( {a}_{i} , {b}_{j} ) = \frac{count ( {a}_{i} , {b}_{j} ) / totalsort ( {b}_{j} )}{{\sum }_{{b}_{1}}^{{b}_{3}} \frac{count ( {a}_{i} , b )}{totalsort ( {b}_{j} )}}$$

[0221] T cell lines and functional assay: T cell lines were generated according to previously published protocol, but using the DNA-BC pMHC tetramer pool. Cells were gated in the same manner as FIG. 8 except for the AF488 channel, where CD3-AF488 was replaced by the dump channel CD4,14,16,19,32,56-AF488. 5 cells from the same population (Neo⁺WT⁻, Neo⁻WT⁺, Neo⁺WT⁺) were sorted into each well. Functional status was analyzed 10-21 days after re-stimulation.

[0222] Functionality was measured and analyzed using the LDH cytotoxicity assay kit (Thermofisher) following manufacturer's instructions as described previously. For FIG. 2G and FIG. 20, T2 cells (ATTC) were pulsed with a peptide pool consisting of either the neoantigen peptides (250 mM total, 12.5 mM each peptide) or 20 wildtype peptides (250 mM total, 12.5 mM each peptide). Background cytotoxicity was subtracted by using T2 cells pulsed with HCV-KLV(WT) peptide (250 mM). For FIG. 21C, T2 cells were pulsed with 12.5 mM of a single peptide or a peptide pool consisting of the 19 indicated neo-antigen or WT peptides at 12.5 mM per peptide. Background cytotoxicity was subtracted by using T2 cells not pulsed with peptide. For each well, 60,000 T cells were incubated with 6,000 peptide-pulsed T2 cells for 4 hours at 37° C. Each condition for each cell line (derived from 5 single sorted cells) was performed in triplicates.

[0223] Lentiviral TCR transduction: Lentivirus production and TCR transduction was performed as previously described with the following modifications. TCR were synthesized as GENPARTS® (GENSCRIPT®) and was cloned into pLEX_307 (a gift from David Root via ADDGENE®) under EF-1a promoter. The vector also confers puromycin resistance. All vector sequences were confirmed via Sanger sequencing prior to viral production. 72 hours after transduction, expression of the TCR was analyzed by flow cytometry. Antigen binding of the transduced cells was confirmed by pMHC tetramer and anti-CD3 antibody (BIOLEGEND®) staining.

[0224] Criteria for peptide classification: MID threshold and signal-to-noise ratio: In order to characterize the non-specific binding level of DNA-BC peptides to T cells, a peptide was defined to be positively binding if the fluorescence intensity of the corresponding pMHC tetramer is above background level, which is set using the flow through fraction after tetramer enrichment. To measure background, fluorescent tetramer negative (Tetramer-) single CD8+ T cells were sorted from the tetramer enriched fraction and measured the number of MIDs associated with each of the non-specifically bound peptides. Results show that these non-specific bound DNA-BCs from Tetramer⁻ single cells have low MID counts associated with each peptide (FIG. 1D, 13A, 15A, 18A, 18E). Another version of peptide classification is based on MID distribution (FIG. 24D, 27A-B).

[0225] The first criteria that was applied to detect positively bound peptides from background level of non-specific binding is a MID count threshold. This threshold was defined to be the maximum MID count-per-peptide from the Tetramer⁻ population with an added 25% buffer, rounded to the nearest tens digit (dashed lines in FIG. 1D, 13A, 15A, 18A, 18E). This value was determined for each TetTCR-Seq experiment.

[0226] The second criteria used for each cell was a signal-to-noise ratio between two borderline peptides, which is defined to be the ratio of the peptide with the lowest MID count above the MID threshold to the peptide with the highest MID count below the MID threshold. The spike-in clone from Experiment 1 was used as the positive control for the MID counts associated with positive and negatively binding peptides, which was validated using traditional tetramer staining (FIG. 1E, 1F, 10A-D). By aggregating all cells from this spike-in clone, the signal-to-noise ratio ranged from 3.6:1 to 61:1. Using this as a guide, the signal-to-noise ratio was set to be greater than 2:1; Cells with a signal-to-noise ratio below this threshold was removed from analysis because the segregation in MID counts between positive and negative binding peptides was too low.

### Example 2

### Establishment of TetTCR-Seq

[0227] To address the challenges associated with prior approaches to TCR analysis, Tetramer Associated TCR Sequencing (TetTCR-Seq) was developed. TetTCR-Seq is a platform for high-throughput pairing of TCR sequence with potentially multiple antigenic pMHC species at single T cell resolution. First, a large library of fluorescently labeled, DNA-barcoded (DNA-BC) pMHC tetramers was constructed in an inexpensive and rapid manner using in vitro transcription/translation (IVTT) (FIG. 1A). Next, tetramer-stained cells were single-cell sorted for concurrent amplification of the DNA-BC and TCRαβ genes in RT-PCR (FIG. 1B). These amplicons were further PCR amplified separately in parallel wells to add the cell barcode and sequencing adapters. A molecular identifier (MID) consisting of 12 random nucleotides (nt) was included in the DNA-BC to provide absolute counting of the copy number for each species of tetramers bound to the cell. Finally, the linking of multiple peptide specificities with their bound TCRα and TCRβ sequences was done using predetermined nucleotide-based cell barcodes. DNA-BC pMHC tetramers are compatible with magnetic enrichment methods for the isolation of rare antigen-binding precursor T cells, making TetTCR-Seq a versatile platform to analyze both clonally expanded and precursor T cells.

[0228] To construct large pMHC libraries via UV-mediated peptide exchange using traditional chemically synthesized peptide is costly with long turnaround times. To solve this problem, TetTCR-Seq utilizes a set of peptide-encoding oligonucleotides that serve as both the DNA-BCs for identifying antigen specificities and DNA templates for peptide generation via IVTT (FIG. 1A). Synthesizing 60 length oligonucleotides is less expensive (about 20-fold) and faster (1-2 days instead of weeks) than synthesizing peptides. The IVTT step only adds a few additional hours, making it possible to generate peptide libraries that are tailored to any disease and/or individuals quickly and affordably.

[0229] pMHC tetramers generated by UV-exchange using either IVTT- or synthetic-produced peptides stained cognate and non-cognate T cell clones similarly (FIGS. 1C and 3). IVTT can generate 20-100 μM of the desired peptide, which is in the concentration range commonly used for UV-mediated peptide exchange (FIG. 4). Covalent attachment of the DNA-BC to PE or APC streptavidin scaffold did not hinder staining performance of the resulting DNA-BC pMHC tetramer (FIG. 5). DNA-BC pMHC tetramer achieved a detection sensitivity of as few as ˜19 tetramer complexes per cell, which is comparable to the fluorescent pMHC tetramer detection limit (FIG. 6). 6 main TetTCR-Seq experiments were performed and they are summarized in FIG. 7.

[0230] The ability of TetTCR-Seq was assessed to accurately link TCRαβ sequence with pMHC binding from primary CD8⁺ T cells in human peripheral blood. In Experiment 1, a 96-peptide library was constructed consisting of well documented foreign and endogenous peptides bound to HLA-A2 and isolated dominant pathogen-specific T cells as well as rare precursor antigen-binding T cells from a healthy CMV sero-positive donor (FIG. 1, 8). To test whether TetTCR-Seq can detect cross-reactive peptides, included in the panel was a documented HCV wildtype (WT) peptide, HCV-KLV(WT), and 4 candidate altered peptide ligands (APL) with 1-2 amino acid (AA) substitutions. A T cell clone that was established using HCV-KLV (WT) was spiked into the donor's sample to test for its potential to cross-react with the APLs.

[0231] TCRα and TCRβ sequences were successfully amplified along with the DNA-BC and the efficiencies are comparable to previous protocols (FIG. 7). Sequencing error-containing DNA-BC reads were removed before downstream analysis (FIG. 9A-C). Positively binding peptides were classified by their MID counts using two criteria: an MID threshold derived from tetramer negative controls and a ratio of MID counts between the peptides above and below this threshold (FIG. 1D). MID counts also correlated with the fluorescence staining intensity (FIG. 9D-E), confirming its utility in quantifying the number of bound pMHC tetramers.

[0232] Using this classification scheme, the expected HCV-KLV(WT) epitope were identified from all sorted cells belonging to the spike-in clone (FIG. 1E, 10A). In addition, it was discovered that all four APLs were also classified as binders. The 6^{th} ranked peptide and beyond, by MID count, all classified as non-binders; Their MID species varied from cell-to-cell, which suggests non-specific binding. A separate pMHC staining experiment on the T cell clone confirmed that the classification is accurate (FIGS. 1F and 10B-D). It was also confirmed that all primary cells with shared TCR sequences also shared the same peptide specificity (=FIG. 10E-F). These results show that TetTCR-Seq is able to resolve positively binding peptides in primary T cell populations and identify up to five cross-reactive peptides per cell.

[0233] The majority of primary T cells were classified as binding one peptide (FIG. 1G). This result is expected because the probability of TCR cross-reactivity between similar peptides is higher than disparate ones, and most of the peptides used in Experiment 1 had a Levenshtein distance of greater than 4 among each other (Table 2, 4). However, two cells were detected that were classified as binding GP100-IMD and GP100-ITD simultaneously (FIG. 1G); these two peptides are only 1 AA apart and cross-reactivity has been previously reported.

[0234] Among the peptides surveyed, a high degree of peptide diversity was found in the foreign-specific naïve T cell repertoire (FIG. 1H). This diversity reduced in the non-naïve repertoire to two dominant peptides for CMV and influenza of high frequency (FIG. 1H). This is expected given the CMV sero-positive status and a high probability of influenza exposure or vaccination for this donor. The majority of cells within the endogenous-binding population responded to MART1-A2L, which corroborates its high documented frequency relative to other endogenous epitopes (FIG. 1H). Linked TCR and DNA-BC analysis uncovered dominant recognition patterns in MART1-A2L and YFV-LLW specific TCRs by the TCRα V gene 12-2 and 12-1/12-2, respectively, with variable TCRβ V gene usage (FIG. 1I). This result is consistent with recent literature reports. In Experiment 2, TetTCR-Seq was performed on a second CMV seropositive donor and verified the findings from Experiment 1 (FIG. 11). These results highlight the ability of TetTCR-Seq to accurately link pMHC binding with TCR sequences.

[0235] TetTCR-Seq was next applied to profile cancer antigen cross-reactivity in healthy donor peripheral blood T cells and isolate neo-antigen (Neo)-specific TCRs with no cross-reactivity to wildtype counterpart antigen (WT). Naïve T cells from healthy donors are a useful source of Neo-specific TCRs. However, most neo-antigens are 1 AA from the WT sequence, meaning that Neo-specific TCRs can potentially cross-react with endogenous host cells to cause severe autoimmunity, and even death. In Experiment 3, 20 pairs of Neo-WT peptides were surveyed that bind with high affinity to HLA-A2. pMHC tetramer-based selection of naïve T cells has an inherent risk of selecting T cells reactive to peptides that are not naturally processed. As such, peptides were also chosen based on previous evidence of tumor expression and T cell targeting. Neo and WT pMHC pools were labeled using two separate fluorophores, allowing for sorting of three cell populations, Neo⁺WT⁻, Neo⁻WT⁺, and Neo⁺WT⁺ (FIGS. 2A and 12).

[0236] Tetramer⁺ CD8⁺ T cells were enriched in the naive phenotype compared to bulk, indicative of no prior exposure to the surveyed antigens (FIG. 12D). No more than one peptide was detected in T cells sorted from either the Neo⁺WT⁻ or the Neo⁻WT⁺ populations (FIG. 13A-C). T cells with two detected peptide binders accounted for 84% of the Neo⁺WT⁺ population, 98% of which belonged to a Neo-WT antigen pair (FIG. 13D).

[0237] Just as in Experiment 1, the criteria correctly classified all peptides for the spike-in HCV-binding clone (FIG. 14). Interestingly, despite only sorting on the CCR7⁺CD45RA⁺ naïve phenotype, 6 clusters of primary T cells were detected with shared TCR sequences on the AA level (Clusters 1-6 in FIG. 14A). Cells with shared TCR u and R sequences bound the same peptide (Clusters la, 2, 5, 6). Many of these TCRs were found to be encoded by different TCRα and TCRβ nucleotide sequences, indicating convergent VDJ recombination. It was also found that in some TCRs, the same TCR α chain is sufficient for them to engage the same pMHC, while TCRβ chains are all different (Clusters 3 and 4). However, in other TCRs, the same TCR α paired with a different TCR β chain can lead to different peptide specificity (Compare Cluster 1c to 1a). These results highlight the advantage of high-throughput linking of TCR sequence with its antigenic peptide as a first step in deciphering the TCR repertoire, which could be complementary to bioinformatics analysis.

[0238] Cells in the Neo⁺WT⁺ population bound 11 of the 20 Neo-WT antigen pairs, indicating that Neo-WT cross-reactivity is wide-spread in the precursor T cell repertoire (FIGS. 2B and 13E). By analyzing the proportion of mono and cross-reactive T cells from each Neo-WT pair, it was observed that neo-antigens with mutations at fringe positions 3, 8, and 9 elicited significantly more cross-reactive responses than the ones at center positions 4, 5, and 6 (FIG. 2C). This is consistent with observations made by others using alanine substitutions on peptides in a mouse model. In Experiment 4, TetTCR-Seq was performed on a separate donor and observed the same trend (FIG. 15). The percentage of cross-reactive T cells for the same Neo-WT antigen pair was not significantly different between Experiment 3 and 4, indicating that this property is conserved between donors for the peptides tested (FIG. 15H).

[0239] Five peptides in Experiment 3 and 4 had no detected T cell binding. Further analysis showed no difference in the pMHC UV-exchange efficiency associated with detected and undetected peptides (FIG. 16). TetTCR-Seq on a subsequent donor using these 5 peptides showed that these antigen-binding T cells are present at low frequencies in blood. Furthermore, monoclonal T cell lines specific for 3 of the peptides were successfully generated and found that IVTT-generated pMHC tetramers stained similarly as their synthetic peptide counterparts. These results confirm that “undetected” peptide-binding T cells in Experiment 3 and 4 were more likely caused by low cell frequency rather than inefficient pMHC generation by IVTT.

[0240] To test the feasibility of TetTCR-Seq to screen larger libraries, a 315 Neo-WT antigen pair library (1 WT is associated with 2 Neo) was assembled and T cell cross-reactivity was profiled across more than 1000 Tetramer⁺ CD8⁺ sorted single T cells from two donors, corresponding to Experiment 5 and 6 (FIGS. 2D and 17-18). Neo-antigens were selected with high predicted affinity for HLA-A2 from recent literature, and preference was given to those with positive binding and/or T cell assays. ELISA on all 315 pMHC species showed no difference in pMHC UV-exchange efficiency between detected and undetected peptides (FIG. 19).

[0241] Similar to Experiment 3 and 4, neo-antigen mutations in the fringes had an elevated percentage of cross-reactive T cells than mutations in the middle (FIG. 2E-F). This difference increased when middle was extended to position 3-7 (FIG. 18J). This larger dataset also enabled us to examine the effect of neo-antigen mutation identity. The PAM1 matrix was used as a measure for chemical similarity between AAs. High PAM1 values correspond to a high mutational probability in evolution. It was found that neo-antigen mutations with high PAM1 values have a significantly higher percentage of cross-reactive T cells than those with low PAM1 values (FIG. 2F, 18K). Thus, in addition to mutation position, WT-binding T cells are more likely to recognize the neo-antigen if the mutated AA is chemically similar to the original. While these results show that mutation position and identity are two major factors that contribute to T cell cross-reactivity, large unaccounted variations still exist between peptides, highlighting the necessity for experimental screening against WT cross-reactivity when using neo-antigen based therapy in cancer.

[0242] Lastly, it was assessed the utility of TetTCR-Seq for isolating neo-antigen-specific TCRs with no cross-reactivity to WT. To this end, cell lines were generated from the Neo⁺WT⁻, Neo⁻WT⁺, and Neo⁺WT⁺ populations using the 40 Neo-WT pMHC tetramer library from Experiment 3 and 4. Each T cell line consist of 5 Tetramer⁺ cells sorted from the same population. These cell lines responded to Neo and WT antigens in a manner that matched their population gating scheme during sorting (FIG. 2G). The choice of fluorophore did not affect this functional profile, as tested by swapping the fluorophore encoding of the DNA-BC pMHC library (FIG. 20). The T cell lines were further characterized in Neo⁺WT⁻ and Neo⁺WT⁺ categories by TetTCR-Seq and found unique TCRs in each cell line targeting a wide range of antigens (FIG. 21A-B). Neo⁺WT⁺ cell lines identified as monoclonal were functional against the Neo-WT antigen pair identified by TetTCR-Seq, but not the other 19 Neo-WT pairs (FIG. 21C).

[0243] To directly show that TCR sequences isolated from primary T cells match the antigen specificity detected by the TetTCR-Seq, five TCRs were transduced from Experiment 3 and 4 into the TCR-deficient Jurkat 76 cell line. TCR-transduced Jurkat cells were stained with pMHC tetramers that corresponded to the neoantigen-WT paired specificity of the primary T cell (FIG. 2H, 22). Together, the TCR-transduced Jurkat and T cell line experiments show that TetTCR-Seq is not only capable of identifying cross-reactive TCRs on a large scale but can also identify mono-specific TCRs that are functionally reactive to Neo-but not WT-peptide in a high-throughput manner. Such TCRs could be therapeutically valuable in TCR re-directed adoptive cell transfer therapy.

[0244] In conclusion, it was shown that TetTCR-Seq can accurately link TCR sequences with multiple antigenic pMHC binders. This platform is general and can be broadly applied to interrogate antigen-binding T cells in clonally expanded or precursor T cell populations, from infection to autoimmune disease to cancer immunotherapy. With promising methods emerging for predicting antigenic pMHCs for groups of TCR sequences, TetTCR-Seq can not only expedite the discovery in this area but also help to experimentally validate informatically predicted antigens. The unique DNA-BC/IVTT approach enables the affordable and rapid generation of a large set of DNA-BC pMHC tetramers, making it possible to widely adopt TetTCR-Seq to accelerate T cell based scientific and clinical discoveries. Lastly, the pairing of TetTCR-Seq with recent advances in single-cell transcriptome and protein quantification signals a future in which integrated single T cell phenotype, TCR sequence, and pMHC-binding landscape can be measured at scale.

TABLE 2
Summary of the 6 main TetTCR-Seq experiments performed and blood donor characteristics. The
percentage difference between “DNA-BC” column and “Antigen Detection” column are those T cells without identified binding antigen
based on the criteria listed. These T cells correspond to grey lines in all the peptide rank curves.

| | | | | CMV | pMHC | Sorted | Cells |
|---|---|---|---|---|---|---|---|
| Expt | Expt Type | Age | Gender | Status | Library^{a} | Population | Sorted |
| 1 | 96 Foreign | 30 | Male | + | 29 Foreign (APC) | Foreign Naïve | 56 |
| | Endogenous | | | | 61 Endogenous (PE) | Foreign Non- | 32 |
| | | | | | 5 HCV-KLV + | Naïve | |
| | | | | | Mut. (APC) | Endogenous | 56 |
| | | | | | 1 Neg. Ctrl | Naïve | |
| | | | | | (PE, APC)^{e} | Endogenous | 23 |
| | | | | | | Non-Naïve | |
| | | | | | | HCV-KLV | 8 |
| | | | | | | Specific Clone | |
| | | | | | | Tetramer⁻ | 8 |
| 2 | 96 Foreign | 51 | Male | + | 29 Foreign (APC) | Foreign Naïve | 96 |
| | Endogenous | | | | 61 Endogenous (PE) | Foreign Non- | 88 |
| | | | | | 6 HCV-KLV + | Naïve | |
| | | | | | Mut. (APC)^{f} | Endogenous | 96 |
| | | | | | | Naïve | |
| | | | | | | Endogenous | 88 |
| | | | | | | Non-Naïve | |
| | | | | | | HCV-KLV | 8 |
| | | | | | | Specific Clone | |
| | | | | | | Tetramer⁻ | 8 |
| 3^{g} | 40 | 56 | Male | − | 20 Neoantigen (APC) | Neo⁺WT⁻ | 142 |
| | Neoantigen | 65 | Male | − | 20 Wildtype (PE) | Neo⁻WT⁺ | 43 |
| | Wildtype | | | | 1 HCV-KLV (PE, APC) | Neo⁺WT⁺ | 76 |
| | | | | | 1 Neg. Ctrl (PE, APC)^{e} | HCV-KLV | 12 |
| | | | | | | Specific Clone | |
| | | | | | | Tetramer⁻ | 12 |
| 4^{g} | 40 | 50 | Male | − | 20 Neoantigen (APC) | Neo⁺WT⁻ | 144 |
| | Neoantigen | 56 | Female | − | 20 Wildtype (PE) | Neo⁻WT⁺ | 44 |
| | Wildtype | | | | 4 MAGE-A (PE, APC)^{h} | Neo⁺WT⁺ | 108 |
| | | | | | | Tetramer⁻ | 35 |
| 5 | 315 | 47 | Female | − | 158 Neoantigen (PE)ⁱ | Neo⁺WT⁻ | 221 |
| | Neoantigen | | | | 157 Wildtype (APC) | Neo⁻WT⁺ | 312 |
| | Wildtype | | | | 1 HCV-KLV (PE, APC) | Neo⁺WT⁺ | 255 |
| | | | | | 1 Neg. Ctrl (PE, APC)^{e} | HCV-KLV | 8 |
| | | | | | | Specific Clone | |
| | | | | | | Tetramer⁻ | 8 |
| 6 | 315 | 58 | Male | − | 158 Neoantigen (PE)ⁱ | Neo⁺WT⁻ | 118 |
| | Neoantigen | | | | 157 Wildtype (APC) | Neo⁻WT⁺ | 68 |
| | Wildtype | | | | 1 HCV-KLV (PE, APC) | Neo⁺WT⁺ | 82 |
| | | | | | 1 Neg. Ctrl (PE, APC)^{e} | Tetramer⁻ | 6 |

Summary of the 6 main TetTCR-Seq experiments performed and blood donor characteristics. The
percentage difference between “DNA-BC” column and “Antigen Detection” column are those T cells without identified binding antigen
based on the criteria listed. These T cells correspond to grey lines in all the peptide rank curves.

| | Amplification Efficiency | | | | Antigen | Relevant |
|---|---|---|---|---|---|---|
| Expt | TCRα^{b} | TCRβ^{b} | TCRαβ^{b} | DNA-BC^{c} | Detection^{d} | Figures |
| 1 | 28 (50%) | 36 (64%) | 20 (36%) | 56 (100%) | 50 (89%) | Main Figure: |
| | 13 (41%) | 19 (59%) | 10 (31%) | 32 (100%) | 32 (100%) | 1b, 1d, 1e, 1g, 1h, 1i |
| | 37 (66%) | 45 (80%) | 34 (61%) | 56 (100%) | 55 (98%) | Supplementary: |
| | 9 (39%) | 12 (52%) | 4 (17%) | 23 (100%) | 23 (100%) | 6, 7, 8 |
| | 8 (100%) | 8 (100%) | 8 (100%) | 8 (100%) | 8 (100%) | |
| | n/a | n/a | n/a | 5 (63%) | 0 (0%) | |
| 2 | 74 (77%) | 78 (81%) | 59 (61%) | 96 (100%) | 85 (79%) | Supplementary: |
| | 67 (76%) | 62 (70%) | 54 (61%) | 88 (100%) | 84 (95%) | 6, 9 |
| | 75 (78%) | 81 (84%) | 64 (67%) | 96 (100%) | 92 (96%) | |
| | 79 (90%) | 83 (94%) | 77 (88%) | 87 (99%) | 75 (85%) | |
| | 7 (88%) | 7 (88%) | 7 (88%) | 8 (100%) | 7 (88%) | |
| | n/a | n/a | n/a | 7 (88%) | 0 (0%) | |
| 3^{g} | 112 (79%) | 130 (92%) | 106 (75%) | 142 (100%) | 127 (89%) | Main Figure: |
| | 36 (84%) | 34 (79%) | 30 (70%) | 43 (100%) | 43 (100%) | 2a-c |
| | 61 (80%) | 71 (93%) | 59 (78%) | 76 (100%) | 71 (93%) | Supplementary: |
| | 12 (100%) | 12 (100%) | 12 (100%) | 12 (100%) | 12 (100%) | 10-12, 14 |
| | n/a | n/a | n/a | 10 (83%) | 0 (0%) | |
| 4^{g} | 34 (24%) | 33 (23%) | 12 (8%) | 144 (100%) | 144 (100%) | Supplementary: |
| | 16 (36%) | 11 (25%) | 6 (14%) | 44 (100%) | 44 (100%) | 10, 13, 14 |
| | 30 (28%) | 31 (29%) | 11 (10%) | 108 (100%) | 95 (88%) | |
| | n/a | n/a | n/a | 13 (37%) | 0 (0%) | |
| 5 | 136 (62%) | 137 (62%) | 112 (51%) | 215 (97%) | 197 (89%) | Main Figure: |
| | 172 (55%) | 183 (59%) | 134 (43%) | 301 (96%) | 186 (60%) | 2d-f |
| | 140 (55%) | 150 (59%) | 108 (42%) | 249 (98%) | 189 (74%) | Supplementary: |
| | 6 (75%) | 6 (75%) | 6 (75%) | 7 (88%) | 7 (88%) | 15-17 |
| | n/a | n/a | n/a | 7 (88%) | 0 (0%) | |
| 6 | 97 (82%) | 99 (84%) | 86 (73%) | 118 (100%) | 118 (100%) | |
| | 53 (78%) | 58 (85%) | 46 (68%) | 68 (100%) | 66 (97%) | |
| | 62 (76%) | 67 (82%) | 52 (63%) | 82 (100%) | 72 (88%) | |
| | n/a | n/a | n/a | 1 (17%) | 0 (0%) | |

^{a}Detailed summary in Supplementary Table. Shown is the number of peptides, peptide category, and fluorescent encoding.
^{b}Includes only cells containing productive TCRα and/or TCRβ sequences are included
^{c}Includes only cells with at least 100 reads of DNA-BC and this applies to Tetramer⁻ cells as well.
^{d}Includes only cells with at least one detected antigen from the MID threshold criteria
^{e}A DNA-BC pMHC tetramer UV-exchanged with a non HLA-A2 binding peptide, RLFAFVRFT
^{f}The library is the same as Expt 1, except for the replacement of the negative control peptide with an additional HCV-KLV mutant peptide, HCV-A9N. This peptide did not bind to the HCV-KLV Specific clone in a separate tetramer staining, and serves as a negative control.
^{g}Blood samples from two donors were pooled together in Experiment 3 and 4
^{h}The library is the same as Expt 3, except for the replacement of the negative control and HCV-KLV peptide with 4 peptides from the MAGE-A antigen family. 3 MAGE-A specific T cells were detected out of 298 cells and were not used for subsequent analysis.
ⁱNeo-antigen/WT pairs are used for all antigens except for DHX33-LLA, which have two neo-antigens with substitutions K5T and M4I. One T cell was found to be cross-reactive to all three peptides.

TABLE 3
TetTCR-Seq summary for experiment 1

| | | | | | | | | | | | | | SEQ |
|---|---|---|---|---|---|---|---|---|---|---|---|---|---|
| | | | | | | | | | | | | | ID |
| | | Detected Peptide by MID Count | | | | | | | | | | | NOs |
| Cell | Sorted | Rank | Rank | Rank | Rank | Rank | TCRα,1 | | TCRα,2 | | TCRβ | | (L to |
| Name | Population | 1 | 2 | 3 | 4 | 5 | TRAV | CDR3α | TRAV | CDR3α | TRBV | CDR3β | R) |
| AA1 | Naïve | ZNT8- | 0 | 0 | 0 | 0 | | | | | 6-2*01,6- | CASSYSE | 1628 |
| | Endogenous | LLS | | | | | | | | | 3*01 | NEQFF | |
| AA10 | Naïve | MART1- | 0 | 0 | 0 | 0 | 12-2*01 | CGGQAGT | | | 6-1*01 | CASRSYV | 1549 |
| | Endogenous | A2L | | | | | | ALIF | | | | ASSNEQF | 1629 |
| | | | | | | | | | | | | F | |
| AA11 | Naïve | MART1- | 0 | 0 | 0 | 0 | 12-2*01 | CAVNGGN | | | 28*01 | CASTQWY | 1550 |
| | Endogenous | A2L | | | | | | QFYF | | | | GGGTPPY | 1630 |
| | | | | | | | | | | | | F | |
| AA12 | Naïve | MART1- | 0 | 0 | 0 | 0 | 12-2*01 | CAVGRDD | | | 7-2*01 | CASSLTT | 1551 |
| | Endogenous | A2L | | | | | | KIIF | | | | GVFSQPQ | 1631 |
| | | | | | | | | | | | | HF | |
| AA2 | Naïve | MART1- | 0 | 0 | 0 | 0 | 17*01 | CATCMDS | | | 15*01 | CATSPYS | 1552 |
| | Endogenous | A2L | | | | | | NYQLIW | | | | VTTFANT | 1632 |
| | | | | | | | | | | | | IYF | |
| AA3 | Naïve | MAGEA10- | 0 | 0 | 0 | 0 | | | | | 2*01 | CAGMTVT | 1633 |
| | Endogenous | GLY | | | | | | | | | | EAFF | |
| AA4 | Naïve | MART1- | 0 | 0 | 0 | 0 | | | | | 4-2*01 | CASSQAL | 1634 |
| | Endogenous | A2L | | | | | | | | | | LAPSTDT | |
| | | | | | | | | | | | | QYF | |
| AA5 | Naïve | MART1- | 0 | 0 | 0 | 0 | 12-2*01 | CAVTTDS | | | 2*01 | CASSEGG | 1553 |
| | Endogenous | A2L | | | | | | WGKLQF | | | | IGELFF | 1635 |
| AA6 | Naïve | MART1- | 0 | 0 | 0 | 0 | | | | | | | |
| | Endogenous | A2L | | | | | | | | | | | |
| AA7 | Naïve | MART1- | 0 | 0 | 0 | 0 | | | | | 4-1*01 | CASSQDT | 1636 |
| | Endogenous | A2L | | | | | | | | | | DGRMFF | |
| AA8 | Naïve | MART1- | 0 | 0 | 0 | 0 | 12-2*01 | CAVNPGG | | | 6-1*01 | CASSEAP | 1554 |
| | Endogenous | A2L | | | | | | ADGLTF | | | | GTSVGGL | 1637 |
| | | | | | | | | | | | | FF | |
| AA9 | Naïve | MART1- | 0 | 0 | 0 | 0 | 12-2*01 | CAVSGSA | | | 28*01 | CASTTGD | 1555 |
| | Endogenous | A2L | | | | | | RQLTF | | | | GLGAFF | 1638 |
| AB1 | Naïve | PPI- | 0 | 0 | 0 | 0 | 8-1*01 | CAVNPRD | | | 4-2*01 | CASSQDI | 1556 |
| | Endogenous | RLL | | | | | | NYGQNFV | | | | GNFEQFF | 1639 |
| | | | | | | | | F | | | | | |
| AB11 | Naïve | MART1- | 0 | 0 | 0 | 0 | | | | | | | |
| | Endogenous | A2L | | | | | | | | | | | |
| AB12 | Naïve | ZNT8- | 0 | 0 | 0 | 0 | 12-3*01 | CAAGGSY | | | 28*01 | CASSGTG | 1557 |
| | Endogenous | LLS | | | | | | IPTF | | | | GYSGANV | 1640 |
| | | | | | | | | | | | | LTF | |
| AB3 | Naïve | MART1- | 0 | 0 | 0 | 0 | | | | | | | |
| | Endogenous | A2L | | | | | | | | | | | |
| AB4 | Naïve | MART1- | 0 | 0 | 0 | 0 | 12-2*01 | CAVNTGF | | | 27*01 | CASSEAN | 1558 |
| | Endogenous | A2L | | | | | | QKLVF | | | | EKLFF | 1641 |
| AB5 | Naïve | MART1- | 0 | 0 | 0 | 0 | 12-2*01 | CAVNGNN | | | 4-1*01 | CASSQAP | 1559 |
| | Endogenous | A2L | | | | | | RLAF | | | | LASGGYT | 1642 |
| | | | | | | | | | | | | F | |
| AB6 | Naïve | MART1- | 0 | 0 | 0 | 0 | 12-2*01 | CAVQGGG | | | 7-2*01 | CASSLAG | 1560 |
| | Endogenous | A2L | | | | | | SQGNLIF | | | | QVFSGEL | 1643 |
| | | | | | | | | | | | | FF | |
| AB7 | Naïve | MART1- | 0 | 0 | 0 | 0 | 12-2*01 | CAAGGSQ | | | 4-2*01 | CASSQGT | 1561 |
| | Endogenous | A2L | | | | | | GNLIF | | | | INTGELF | 1644 |
| | | | | | | | | | | | | F | |
| AB8 | Naïve | MART1- | 0 | 0 | 0 | 0 | 12-2*01 | CAVNIPT | | | 20-1*01 | CSARDGT | 1562 |
| | Endogenous | A2L | | | | | | F | | | | SSGYF | 1645 |
| AB9 | Naïve | MART1- | 0 | 0 | 0 | 0 | | | | | 19*01 | CASMPRG | 1646 |
| | Endogenous | A2L | | | | | | | | | | FPSDEQF | |
| | | | | | | | | | | | | F | |
| AC1 | Naïve | MART1- | 0 | 0 | 0 | 0 | | | | | 4-2*01 | CASSQDW | 1647 |
| | Endogenous | A2L | | | | | | | | | | VAEQYF | |
| AC10 | Naïve | MART1- | 0 | 0 | 0 | 0 | 12-2*01 | CAVSGTA | | | 6-6*01 | CASSYGT | 1563 |
| | Endogenous | A2L | | | | | | SKLTF | | | | GDGYTF | 1648 |
| AC11 | Naïve | GP100- | 0 | 0 | 0 | 0 | 13-2*01 | CAEKGGG | | | | | 1564 |
| | Endogenous | IMD | | | | | | GADGLTF | | | | | |
| AC12 | Naïve | MART1- | 0 | 0 | 0 | 0 | 23/DV6* | CAASKEA | 12-2*01 | CAVKD | 28*01 | CASSLGL | 1565 |
| | Endogenous | A2L | | | | | 01 | AGNKLTF | | GQNFV | | GQPQHF | 1625 |
| | | | | | | | | | | F | | | 1649 |
| AC2 | Naïve | GP100- | GP100- | 0 | 0 | 0 | 26-1*01 | CIVRGFA | 16*01 | CALSP | 18*01 | CASSSRD | 1566 |
| | Endogenous | IMD | ITD | | | | | YGQNFVF | | GYNFN | | RSSSTEA | 1626 |
| | | | | | | | | | | KFYF | | FF | 1650 |
| AC3 | Naïve | MART1- | 0 | 0 | 0 | 0 | | | | | | | |
| | Endogenous | A2L | | | | | | | | | | | |
| AC4 | Naïve | MART1- | 0 | 0 | 0 | 0 | 12-2*01 | CAVSDGQ | | | 14*01 | CASSQAG | 1567 |
| | Endogenous | A2L | | | | | | KLLF | | | | VGGELFF | 1651 |
| AC5 | Naïve | MART1- | 0 | 0 | 0 | 0 | | | | | 28*01 | CASSLPG | 1652 |
| | Endogenous | A2L | | | | | | | | | | LASHEQF | |
| | | | | | | | | | | | | F | |
| AC6 | Naïve | MART1- | 0 | 0 | 0 | 0 | 12-2*01 | CAVTRGG | | | 6-5*01 | CASSYSG | 1586 |
| | Endogenous | A2L | | | | | | ADGLTF | | | | LGQPQHF | 1653 |
| AC7 | Naïve | MART1- | 0 | 0 | 0 | 0 | 13-2*01 | CAENRDG | * | | | | 1569 |
| | Endogenous | A2L | | | | | | DDKIIF | | | | | |
| AC8 | Naïve | MART1- | 0 | 0 | 0 | 0 | 12-2*01 | CAASGGG | | | 28*01 | CASSSTV | 1570 |
| | Endogenous | A2L | | | | | | ADGLTF | | | | YNEQFF | 1654 |
| AC9 | Naïve | MART1- | 0 | 0 | 0 | 0 | 12-2*01 | CAVRTQI | | | 27*01 | CASSRSP | 1571 |
| | Endogenous | A2L | | | | | | IF | | | | GGVYEQY | 1655 |
| | | | | | | | | | | | | F | |
| AD1 | Naïve | MART1- | 0 | 0 | 0 | 0 | | | | | | | |
| | Endogenous | A2L | | | | | | | | | | | |
| AD10 | Naïve | MART1- | 0 | 0 | 0 | 0 | 41*01 | CAVRSER | | | 27*01 | CASSPSP | 1572 |
| | Endogenous | A2L | | | | | | SGGGADG | | | | AGAYEQY | 1656 |
| | | | | | | | | LTF | | | | F | |
| AD11 | Naïve | CD1- | 0 | 0 | 0 | 0 | 12-2*01 | CAVNDYK | | | 27*01 | CASSWTG | 1573 |
| | Endogenous | LLG | | | | | | LSF | | | | ANYGYTF | 1657 |
| AD12 | Naïve | MART1- | 0 | 0 | 0 | 0 | 12-2*01 | CAVNTGF | | | 27*01 | CASSPNL | 1558 |
| | Endogenous | A2L | | | | | | QKLVF | | | | AGEEQYF | 1658 |
| AD2 | Naïve | MART1- | 0 | 0 | 0 | 0 | | | | | | | |
| | Endogenous | A2L | | | | | | | | | | | |
| AD3 | Naïve | MART1- | 0 | 0 | 0 | 0 | 12-2*01 | CAAEFYF | | | 11-1*01 | CASSLGQ | 1574 |
| | Endogenous | A2L | | | | | | | | | | GQPQHF | 1659 |
| AD4 | Naïve | MART1- | 0 | 0 | 0 | 0 | 12-2*01 | CASDNNA | | | 4-1*01 | CASSQEV | 1575 |
| | Endogenous | A2L | | | | | | RLMF | | | | VANNEQF | 1660 |
| | | | | | | | | | | | | F | |
| AD5 | Naïve | MART1- | 0 | 0 | 0 | 0 | | | | | 27*01 | CASSLGG | 1661 |
| | Endogenous | A2L | | | | | | | | | | NTGELFF | |
| AD6 | Naïve | MART1- | 0 | 0 | 0 | 0 | 12-2*01 | CAVIRSG | | | 5-6*01 | CASSLEL | 1576 |
| | Endogenous | A2L | | | | | | GYNKLIF | | | | AGGPAFF | 1662 |
| AD7 | Naïve | MART1- | 0 | 0 | 0 | 0 | | | | | | | |
| | Endogenous | A2L | | | | | | | | | | | |
| AD8 | Naïve | MART1- | 0 | 0 | 0 | 0 | | | | | 2*01 | CASRAGI | 1663 |
| | Endogenous | A2L | | | | | | | | | | QSGELFF | |
| AD9 | Naïve | MART1- | 0 | 0 | 0 | 0 | | | | | 27*01 | CASSPSG | 1664 |
| | Endogenous | A2L | | | | | | | | | | HYEQYF | |
| AE1 | Naïve | CMV- | 0 | 0 | 0 | 0 | 12-2*01 | CAGFSGG | | | 9*01 | CASSRGT | 1577 |
| | Foreign | MLN | | | | | | YNKLIF | | | | GGYEQFF | 1665 |
| AE10 | Naïve | HTLV- | 0 | 0 | 0 | 0 | 12-3*01 | CTSRVSD | | | | | 1578 |
| | Foreign | LLF | | | | | | GQKLLF | | | | | |
| AE11 | Naïve | YFV- | 0 | 0 | 0 | 0 | | | | | 12- | CASSLSG | 1666 |
| | Foreign | LLW | | | | | | | | | 3*01,12- | DEQYF | |
| | | | | | | | | | | | 4*01 | | |
| AE12 | Naïve | YFV- | 0 | 0 | 0 | 0 | 12-1*01 | CVVNNDK | | | 27*01 | CASSLTP | 1579 |
| | Foreign | LLW | | | | | | IIF | | | | SASGYEQ | 1667 |
| | | | | | | | | | | | | YF | |
| AE2 | Naïve | HSV- | 0 | 0 | 0 | 0 | | | | | | | |
| | Foreign | SLP | | | | | | | | | | | |
| AE3 | Naïve | HSV- | 0 | 0 | 0 | 0 | | | | | | | |
| | Foreign | SLP | | | | | | | | | | | |
| AE4 | Naïve | HSV- | 0 | 0 | 0 | 0 | | | | | | | |
| | Foreign | SLP | | | | | | | | | | | |
| AE5 | Naïve | YFV- | 0 | 0 | 0 | 0 | | | | | | | |
| | Foreign | LLW | | | | | | | | | | | |
| AE6 | Naïve | IVPA- | 0 | 0 | 0 | 0 | | | | | | | |
| | Foreign | FMY | | | | | | | | | | | |
| AE7 | Naïve | ALADH- | 0 | 0 | 0 | 0 | 12-1*01 | CVVNEYS | | | 14*01 | CASSQGW | 1580 |
| | Foreign | VLM | | | | | | SASKIIF | | | | DEQYF | 1668 |
| AE8 | Naïve | ALADH- | 0 | 0 | 0 | 0 | | | | | 9*01 | CASSTLS | 1669 |
| | Foreign | VLM | | | | | | | | | | GNYNEQF | |
| | | | | | | | | | | | | F | |
| AE9 | Naïve | HCV- | 0 | 0 | 0 | 0 | | | | | 28*01 | CASGSVP | 1670 |
| | Foreign | L2I | | | | | | | | | | EQYF | |
| AF1 | Naïve | YFV- | 0 | 0 | 0 | 0 | 12-1*01 | CVVAEAR | | | 27*01 | CASSPGT | 1581 |
| | Foreign | LLW | | | | | | LMF | | | | GGTYEQY | 1671 |
| | | | | | | | | | | | | F | |
| AF10 | Naïve | EBV- | 0 | 0 | 0 | 0 | | | | | 27*01 | CASSGLA | 1672 |
| | Foreign | YLQ | | | | | | | | | | GFSPQET | |
| | | | | | | | | | | | | QYF | |
| AF11 | Naïve | YFV- | 0 | 0 | 0 | 0 | | | | | 9*01 | CASSGGT | 1673 |
| | Foreign | LLW | | | | | | | | | | GAYEQYF | |
| AF12 | Naïve | HBV- | 0 | 0 | 0 | 0 | 12-2*01 | CAVNGAN | | | | | 1582 |
| | Foreign | WLS | | | | | | DYKLSF | | | | | |
| AF2 | Naïve | HCV- | 0 | 0 | 0 | 0 | | | | | 28*01 | CASSAGA | 1674 |
| | Foreign | LLF | | | | | | | | | | SIEQYF | |
| AF3 | Naïve | EBV- | 0 | 0 | 0 | 0 | | | | | | | |
| | Foreign | YLQ | | | | | | | | | | | |
| AF4 | Naïve | HBV- | 0 | 0 | 0 | 0 | | | | | 3-1*01 | CASSLGQ | 1675 |
| | Foreign | WLS | | | | | | | | | | GGVGEKL | |
| | | | | | | | | | | | | FF | |
| AF5 | Naïve | HTLV- | 0 | 0 | 0 | 0 | 38- | CAYSMLD | | | 15*01 | CATRKSY | 1583 |
| | Foreign | LLF | | | | | 2/DV8* | RLMF | | | | NSPLHF | 1676 |
| | | | | | | | 01 | | | | | | |
| AF6 | Naïve | IVPA- | 0 | 0 | 0 | 0 | | | | | | | |
| | Foreign | FMY | | | | | | | | | | | |
| AF7 | Naïve | HTLV- | 0 | 0 | 0 | 0 | | | | | | | |
| | Foreign | LLF | | | | | | | | | | | |
| AF8 | Naïve | YFV- | 0 | 0 | 0 | 0 | 8-3*01 | CAVGSDS | | | 4-1*01 | CASSQAQ | 1584 |
| | Foreign | LLW | | | | | | SYKLIF | | | | GTYEQYF | 1677 |
| AF9 | Naïve | HTLV- | 0 | 0 | 0 | 0 | | | | | | | |
| | Foreign | LLF | | | | | | | | | | | |
| AG1 | Naïve | CMV- | 0 | 0 | 0 | 0 | | | | | 27*01 | CASSLGW | 1678 |
| | Foreign | MLN | | | | | | | | | | GYEQYF | |
| AG10 | Naïve | CMV- | 0 | 0 | 0 | 0 | 12-2*01 | CAVGIYN | | | 4-1*01 | CASSPGL | 1585 |
| | Foreign | MLN | | | | | | QGGKLIF | | | | DYEQYF | 1679 |
| AG11 | Naïve | IV- | GLNS- | 0 | 0 | 0 | | | | | | | |
| | Foreign | GIL | GLL | | | | | | | | | | |
| AG12 | Naïve | YFV- | 0 | 0 | 0 | 0 | | | | | 12- | CASTRQF | 1680 |
| | Foreign | LLW | | | | | | | | | 3*01,12- | NQPQHF | |
| | | | | | | | | | | | 4*01 | | |
| AG2 | Naïve | YFV- | 0 | 0 | 0 | 0 | 8-1*01 | CAVRRDD | | | | | 1586 |
| | Foreign | LLW | | | | | | KIIF | | | | | |
| AG3 | Naïve | YFV- | 0 | 0 | 0 | 0 | 12-2*01 | CAVNEGT | | | 4-1*01 | CASSQGG | 1587 |
| | Foreign | LLW | | | | | | GNQFYF | | | | GTEAFF | 1681 |
| AG4 | Naïve | HPV- | 0 | 0 | 0 | 0 | | | | | | | |
| | Foreign | YML | | | | | | | | | | | |
| AG5 | Naïve | EBV- | 0 | 0 | 0 | 0 | 12-2*01 | CAVKGGG | | | 29-1*01 | CSALTGS | 1588 |
| | Foreign | YVL | | | | | | ADGLTF | | | | SYEQYF | 1682 |
| AG7 | Naïve | YFV- | 0 | 0 | 0 | 0 | 12-2*01 | CAEGGGA | | | 9*01 | CASSGGY | 1589 |
| | Foreign | LLW | | | | | | DGLTF | | | | EQYF | 1683 |
| AG8 | Naïve | YFV- | 0 | 0 | 0 | 0 | 12-1*01 | CVVNMGK | | | 27*01 | CASSFGD | 1590 |
| | Foreign | LLW | | | | | | NGQKLLF | | | | SYEQYF | 1684 |
| AG9 | Naïve | HTLV- | 0 | 0 | 0 | 0 | 29/DV5* | CAALISN | | | | | 1591 |
| | Foreign | LLF | | | | | 01 | FGNEKLT | | | | | |
| | | | | | | | | F | | | | | |
| AH1 | Naïve | IV- | 0 | 0 | 0 | 0 | 27*01 | CAGGGSQ | | | | | 1592 |
| | Foreign | GIL | | | | | | GNLIF | | | | | |
| AH10 | Naïve | YFV- | 0 | 0 | 0 | 0 | | | | | 9*01 | CASSLSG | 1685 |
| | Foreign | LLW | | | | | | | | | | SSYEQYF | |
| AH11 | Naïve | YFV- | 0 | 0 | 0 | 0 | 38- | CASLGQG | | | 10-3*01 | CAISEAS | 1593 |
| | Foreign | LLW | | | | | 2/DV8* | AQKLVF | | | | GVTYEQY | 1686 |
| | | | | | | | 01 | | | | | F | |
| AH12 | Naïve | CMV- | 0 | 0 | 0 | 0 | | | | | 4-3*01 | CASSQGQ | 1687 |
| | Foreign | MLN | | | | | | | | | | GYEQYF | |
| AH2 | Naïve | CMV- | 0 | 0 | 0 | 0 | | | | | 25-1*01 | CASSGSR | 1688 |
| | Foreign | MLN | | | | | | | | | | VPYEQYF | |
| AH3 | Naïve | 0 | 0 | 0 | 0 | 0 | 12-2*01 | CAVNQAG | | | 4-1*01 | CASSQTG | 1594 |
| | Foreign | | | | | | | TALIF | | | | TGAYEQY | 1689 |
| | | | | | | | | | | | | F | |
| AH4 | Naïve | 0 | 0 | 0 | 0 | 0 | 5*01 | CAEYSSA | | | 20-1*01 | CSANRQG | 1595 |
| | Foreign | | | | | | | SKIIF | | | | SIYF | 1690 |
| AH5 | Naïve | GLNS- | 0 | 0 | 0 | 0 | 12-2*01 | CAVNRDS | | | 27*01 | CASSFEW | 1596 |
| | Foreign | GLL | | | | | | GTYKYIF | | | | SYEQYF | 1691 |
| AH6 | Naïve | HTLV- | 0 | 0 | 0 | 0 | 24*01 | CASISLD | | | | | 1597 |
| | Foreign | LLF | | | | | | SNYQLIW | | | | | |
| AH7 | Naïve | YFV- | 0 | 0 | 0 | 0 | | | | | 12- | CASSHRG | 1692 |
| | Foreign | LLW | | | | | | | | | 3*01,12- | YEQYF | |
| | | | | | | | | | | | 4*01 | | |
| AH8 | Naïve | CMV- | 0 | 0 | 0 | 0 | | | | | 28*01 | CASSPID | 1693 |
| | Foreign | MLN | | | | | | | | | | RAGGPYE | |
| | | | | | | | | | | | | QYF | |
| AH9 | Naïve | HTLV- | 0 | 0 | 0 | 0 | | | | | | | |
| | Foreign | LLF | | | | | | | | | | | |
| BA1 | Naïve | MART1- | 0 | 0 | 0 | 0 | 12-2*01 | CAVGREA | | | 6-4*01 | CASSLTS | 1598 |
| | Endogenous | A2L | | | | | | AGNKLTF | | | | GSFAGEL | 1694 |
| | | | | | | | | | | | | FF | |
| BA10 | Naïve | MART1- | 0 | 0 | 0 | 0 | 16*01 | CALSRPS | | | 28*01 | CASSPQG | 1599 |
| | Endogenous | A2L | | | | | | RGSQGNL | | | | SGGEAFF | 1695 |
| | | | | | | | | IF | | | | | |
| BA12 | Naïve | YFV- | 0 | 0 | 0 | 0 | 26-1*01 | CIVAAIS | | | 6-2*01,6- | CASSYGG | 1600 |
| | Foreign | LLW | | | | | | GSARQLT | | | 3*01 | GYEQYF | 1696 |
| | | | | | | | | F | | | | | |
| BA2 | Naïve | MART1- | 0 | 0 | 0 | 0 | 12-2*01 | CAVSGGG | | | 28*01 | CASSALG | 1601 |
| | Endogenous | A2L | | | | | | ADGLTF | | | | INEQFF | 1697 |
| BA3 | Naïve | MART1- | 0 | 0 | 0 | 0 | 12-2*01 | CAVNVQG | | | 28*01 | CASSWTG | 1602 |
| | Endogenous | A2L | | | | | | GSEKLVF | | | | GGQPQHF | 1698 |
| BA4 | Naïve | IGRP- | 0 | 0 | 0 | 0 | | | | | | | |
| | Endogenous | VLF | | | | | | | | | | | |
| BA5 | Naïve | MART1- | 0 | 0 | 0 | 0 | | | | | 6-5*01 | CASNQGP | 1699 |
| | Endogenous | A2L | | | | | | | | | | GNTIYF | |
| BA6 | Naïve | MART1- | 0 | 0 | 0 | 0 | 12-2*01 | CAVNKGF | | | 27*01 | CASSDSY | 1603 |
| | Endogenous | A2L | | | | | | QKLVF | | | | EQYF | 1700 |
| BA7 | Naïve | GP100- | GP100- | 0 | 0 | 0 | 17*01 | CATDGRG | | | | | 1604 |
| | Endogenous | IMD | ITD | | | | | STLGRLY | | | | | |
| | | | | | | | | F | | | | | |
| BA8 | Naïve | PPI- | 0 | 0 | 0 | 0 | 12-3*01 | CAMSESD | | | 4-1*01 | CASSLVP | 1605 |
| | Endogenous | 15-23 | | | | | | GQKLLF | | | | LSPEQYF | 1701 |
| BA9 | Naïve | MART1- | 0 | 0 | 0 | 0 | 13-1*01 | CAPPGDG | | | 12- | CASSLGA | 1606 |
| | Endogenous | A2L | | | | | | NNRLAF | | | 3*01,12- | GGGGTQY | 1702 |
| | | | | | | | | | | | 4*01 | F | |
| BB1 | Naïve | HBV- | 0 | 0 | 0 | 0 | | | | | 28*01 | CASSQQG | 1703 |
| | Foreign | WLS | | | | | | | | | | VWGTGEL | |
| | | | | | | | | | | | | FF | |
| BB10 | Non-Naïve | IV- | 0 | 0 | 0 | 0 | 27*01 | CAGAGGG | | | 19*01 | CASSPRS | 1607 |
| | Foreign | GIL | | | | | | SQGNLIF | | | | TDTQYF | 1704 |
| BB11 | Non-Naïve | CMV- | 0 | 0 | 0 | 0 | | | | | 28*01 | CASSFQG | 1705 |
| | Foreign | NLV | | | | | | | | | | YTEAFF | |
| BB12 | Non-Naïve | CMV- | 0 | 0 | 0 | 0 | | | | | | | |
| | Foreign | NLV | | | | | | | | | | | |
| BB2 | Naïve | YFV- | 0 | 0 | 0 | 0 | 12-2*01 | CAVNSDG | | | | | 1608 |
| | Foreign | LLW | | | | | | QKLLF | | | | | |
| BB3 | Naïve | 0 | 0 | 0 | 0 | 0 | 3*01 | CAVRDMG | | | 6-6*01 | CASSYAQ | 1609 |
| | Foreign | | | | | | | SNYQLIW | | | | GAETQYF | 1706 |
| BB4 | Naïve | HTLV- | 0 | 0 | 0 | 0 | 29/DV5* | CAASAST | | | 27*01 | CASSLGL | 1610 |
| | Foreign | LLF | | | | | 01 | DKLIF | | | | ADPNNEQ | 1707 |
| | | | | | | | | | | | | FF | |
| BB5 | Naïve | IV- | 0 | 0 | 0 | 0 | 27*01 | CAGASTG | | | | | 1611 |
| | Foreign | GIL | | | | | | GDSGNTG | | | | | |
| | | | | | | | | KLIF | | | | | |
| BB6 | Naïve | HTLV- | 0 | 0 | 0 | 0 | 12-3*01 | CAMSLSN | | | 20-1*01 | CSARDGG | 1612 |
| | Foreign | LLF | | | | | | FGNEKLT | | | | LAGEQKV | 1708 |
| | | | | | | | | F | | | | GDTQYF | |
| BB7 | Naïve | CMV- | 0 | 0 | 0 | 0 | 8-4*01 | CAVILQG | 8-4*01 | CAVSS | 20-1*01 | CSARGAG | 1613 |
| | Foreign | MLN | | | | | | AQKLVF | | ITQGG | | VPYEQYF | 1627 |
| | | | | | | | | | | SEKLV | | | 1709 |
| | | | | | | | | | | F | | | |
| BB8 | Naïve | CMV- | 0 | 0 | 0 | 0 | | | | | 9*01 | CASSVGV | 1710 |
| | Foreign | MLN | | | | | | | | | | SGSFYEQ | |
| | | | | | | | | | | | | YF | |
| BB9 | Non-Naïve | CMV- | 0 | 0 | 0 | 0 | | | | | | | |
| | Foreign | NLV | | | | | | | | | | | |
| BC1 | Non-Naïve | IV- | 0 | 0 | 0 | 0 | | | | | 19*01 | CASWDRG | 1711 |
| | Foreign | GIL | | | | | | | | | | NEQFF | |
| BC10 | Non-Naïve | CMV- | 0 | 0 | 0 | 0 | | | | | | | |
| | Foreign | NLV | | | | | | | | | | | |
| BC11 | Non-Naïve | CMV- | 0 | 0 | 0 | 0 | 3*01 | CADYYGQ | | | 28*01 | CASSFQG | 1614 |
| | Foreign | NLV | | | | | | NFVF | | | | YTEAFF | 1705 |
| BC12 | Non-Naïve | IV- | 0 | 0 | 0 | 0 | 27*01 | CAGQTGN | | | | | 1615 |
| | Foreign | GIL | | | | | | TGKLIF | | | | | |
| BC2 | Non-Naïve | CMV- | 0 | 0 | 0 | 0 | 35*01 | CAGPMKT | | | 12- | CASSSAN | 1616 |
| | Foreign | NLV | | | | | | SYDKVIF | | | 3*01,12- | YGYTF | 1712 |
| | | | | | | | | | | | 4*01 | | |
| BC3 | Non-Naïve | CMV- | 0 | 0 | 0 | 0 | | | | | 12- | CASSSAN | 1712 |
| | Foreign | NLV | | | | | | | | | 3*01,12- | YGYTF | |
| | | | | | | | | | | | 4*01 | | |
| BC4 | Non-Naïve | CMV- | 0 | 0 | 0 | 0 | | | | | 28*01 | CASSFQG | 1705 |
| | Foreign | NLV | | | | | | | | | | YTEAFF | |
| BC5 | Non-Naïve | CMV- | 0 | 0 | 0 | 0 | 3*01 | CADYYGQ | | | 28*01 | CASSFQG | 1614 |
| | Foreign | NLV | | | | | | NFVF | | | | YTEAFF | 1705 |
| BC6 | Non-Naïve | CMV- | 0 | 0 | 0 | 0 | | | | | | | |
| | Foreign | NLV | | | | | | | | | | | |
| BC7 | Non-Naïve | IV- | 0 | 0 | 0 | 0 | | | | | | | |
| | Foreign | GIL | | | | | | | | | | | |
| BC8 | Non-Naïve | IV- | 0 | 0 | 0 | 0 | | | | | 3-1*01 | CASSQFR | 1713 |
| | Foreign | GIL | | | | | | | | | | GGRDGYT | |
| | | | | | | | | | | | | F | |
| BC9 | Non-Naïve | CMV- | 0 | 0 | 0 | 0 | 3*01 | CADYYGQ | | | 28*01 | CASSFQG | 1614 |
| | Foreign | NLV | | | | | | NFVF | | | | YTEAFF | 1705 |
| BD1 | Non-Naïve | CMV- | 0 | 0 | 0 | 0 | 35*01 | CAGPMKT | | | 12- | CASSSAN | 1616 |
| | Foreign | NLV | | | | | | SYDKVIF | | | 3*01,12- | YGYTF | 1712 |
| | | | | | | | | | | | 4*01 | | |
| BD10 | Non-Naïve | CMV- | 0 | 0 | 0 | 0 | | | | | 12- | CASSSAN | 1712 |
| | Foreign | NLV | | | | | | | | | 3*01,12- | YGYTF | |
| | | | | | | | | | | | 4*01 | | |
| BD11 | Non-Naïve | IV- | 0 | 0 | 0 | 0 | | | | | | | |
| | Foreign | GIL | | | | | | | | | | | |
| BD12 | Non-Naïve | CMV- | 0 | 0 | 0 | 0 | 24*01 | CARNTGN | | | 6-5*01 | CASSYST | 1617 |
| | Foreign | NLV | | | | | | QFYF | | | | GTAYGYT | 1714 |
| | | | | | | | | | | | | F | |
| BD2 | Non-Naïve | CMV- | 0 | 0 | 0 | 0 | 35*01 | CAGPMKT | | | 12- | CASSSAN | 1616 |
| | Foreign | NLV | | | | | | SYDKVIF | | | 3*01,12- | YGYTF | 1712 |
| | | | | | | | | | | | 4*01 | | |
| BD3 | Non-Naïve | IV- | 0 | 0 | 0 | 0 | 30*01 | CGTLRNN | | | | | 1618 |
| | Foreign | GIL | | | | | | NARLMF | | | | | |
| BD4 | Non-Naïve | IV- | 0 | 0 | 0 | 0 | | | | | | | |
| | Foreign | GIL | | | | | | | | | | | |
| BD5 | Non-Naïve | IV- | 0 | 0 | 0 | 0 | 27*01 | CAGGGSQ | | | 19*01 | CASSIRS | 1592 |
| | Foreign | GIL | | | | | | GNLIF | | | | SYEQYF | 1715 |
| BD6 | Non-Naïve | IV- | 0 | 0 | 0 | 0 | | | | | 9*01 | CASSARD | 1716 |
| | Foreign | GIL | | | | | | | | | | FAYEQYF | |
| BD7 | Non-Naïve | CMV- | 0 | 0 | 0 | 0 | | | | | 12- | CASSSAN | 1712 |
| | Foreign | NLV | | | | | | | | | 3*01,12- | YGYTF | |
| | | | | | | | | | | | 4*01 | | |
| BD8 | Non-Naïve | IV- | 0 | 0 | 0 | 0 | 30*01 | CGTLRNN | | | 19*01 | CASWDRG | 1618 |
| | Foreign | GIL | | | | | | NARLMF | | | | NEQFF | 1711 |
| BD9 | Non-Naïve | IV- | 0 | 0 | 0 | 0 | 27*01 | CAGDKGG | | | | | 1619 |
| | Foreign | GIL | | | | | | GSQGNLI | | | | | |
| | | | | | | | | F | | | | | |
| BE1 | Non-Naïve | IV- | 0 | 0 | 0 | 0 | | | | | | | |
| | Foreign | GIL | | | | | | | | | | | |
| BE10 | Non-Naïve | MART1- | 0 | 0 | 0 | 0 | 12-2*01 | CAVTGGG | | | 27*01 | CASSFAL | 1620 |
| | Endogenous | A2L | | | | | | TSYGKLT | | | | SNEAFF | 1717 |
| | | | | | | | | F | | | | | |
| BE11 | Non-Naïve | PD5- | 0 | 0 | 0 | 0 | | | | | 6-1*01 | CASDEKL | 1718 |
| | Endogenous | KLS | | | | | | | | | | FF | |
| BE12 | Non-Naïve | MART1- | 0 | 0 | 0 | 0 | | | | | 27*01 | CASSFAG | 1719 |
| | Endogenous | A2L | | | | | | | | | | TTEAFF | |
| BE2 | Non-Naïve | IV- | 0 | 0 | 0 | 0 | | | | | | | |
| | Foreign | GIL | | | | | | | | | | | |
| BE3 | Non-Naïve | IV- | 0 | 0 | 0 | 0 | | | | | | | |
| | Foreign | GIL | | | | | | | | | | | |
| BE4 | Non-Naïve | CMV- | 0 | 0 | 0 | 0 | | | | | 28*01 | CASSFQG | 1705 |
| | Foreign | NLV | | | | | | | | | | YTEAFF | |
| BE6 | Non-Naïve | MART1- | 0 | 0 | 0 | 0 | | | | | | | |
| | Endogenous | A2L | | | | | | | | | | | |
| BE7 | Non-Naïve | MART1- | 0 | 0 | 0 | 0 | | | | | 27*01 | CASSFAG | 1719 |
| | Endogenous | A2L | | | | | | | | | | TTEAFF | |
| BE8 | Non-Naïve | MART1- | 0 | 0 | 0 | 0 | 12-2*01 | CAVTAGG | | | | | 1621 |
| | Endogenous | A2L | | | | | | TSYGKLT | | | | | |
| | | | | | | | | F | | | | | |
| BE9 | Non-Naïve | MART1- | 0 | 0 | 0 | 0 | 12-2*01 | CAVTAGG | | | | | 1621 |
| | Endogenous | A2L | | | | | | TSYGKLT | | | | | |
| | | | | | | | | F | | | | | |
| BF1 | Non-Naïve | MART1- | 0 | 0 | 0 | 0 | | | | | 27*01 | CASSFAG | 1719 |
| | Endogenous | A2L | | | | | | | | | | TTEAFF | |
| BF10 | Non-Naïve | MART1- | 0 | 0 | 0 | 0 | | | | | | | |
| | Endogenous | A2L | | | | | | | | | | | |
| BF11 | Non-Naïve | MART1- | 0 | 0 | 0 | 0 | 12-2*01 | CAVTAGG | 38-2/ | CAYRS | | | 1621 |
| | Endogenous | A2L | | | | | | TSYGKLT | DV8*01 | PPSSE | | | 1624 |
| | | | | | | | | F | | KLVF | | | |
| BF12 | Non-Naïve | MART1- | 0 | 0 | 0 | 0 | 12-2*01 | CAVTAGG | 30*01 | CGTLR | | | 1621 |
| | Endogenous | A2L | | | | | | TSYGKLT | | NNNAR | | | 1618 |
| | | | | | | | | F | | LMF | | | |
| BF2 | Non-Naïve | TYR- | 0 | 0 | 0 | 0 | | | | | 29-1*01 | CSVTGTG | 1720 |
| | Endogenous | YMD | | | | | | | | | | LFDEQYF | |
| BF3 | Non-Naïve | MART1- | 0 | 0 | 0 | 0 | | | | | 27*01 | CASSFAG | 1719 |
| | Endogenous | A2L | | | | | | | | | | TTEAFF | |
| BF4 | Non-Naïve | MART1- | 0 | 0 | 0 | 0 | | | | | 27*01 | CASSFAG | 1719 |
| | Endogenous | A2L | | | | | | | | | | TTEAFF | |
| BF5 | Non-Naïve | MART1- | 0 | 0 | 0 | 0 | 12-2*01 | CAVTAGG | | | | | 1621 |
| | Endogenous | A2L | | | | | | TSYGKLT | | | | | |
| | | | | | | | | F | | | | | |
| BF6 | Non-Naïve | PD5- | 0 | 0 | 0 | 0 | | | | | | | |
| | Endogenous | KLS | | | | | | | | | | | |
| BF7 | Non-Naïve | MART1- | 0 | 0 | 0 | 0 | | | | | 27*01 | CASSFAG | 1719 |
| | Endogenous | A2L | | | | | | | | | | TTEAFF | |
| BF8 | Non-Naïve | CD1- | 0 | 0 | 0 | 0 | 12-2*01 | CAVYSGG | | | 27*01 | CASSFVN | 1622 |
| | Endogenous | LLG | | | | | | YNKLIF | | | | TGELFF | 1721 |
| BF9 | Non-Naïve | MART1- | 0 | 0 | 0 | 0 | | | | | | | |
| | Endogenous | A2L | | | | | | | | | | | |
| BG1 | Non-Naïve | MART1- | 0 | 0 | 0 | 0 | | | | | | | |
| | Endogenous | A2L | | | | | | | | | | | |
| BG2 | Non-Naïve | MART1- | 0 | 0 | 0 | 0 | 12-2*01 | CAVTAGG | | | 27*01 | CASSFAG | 1621 |
| | Endogenous | A2L | | | | | | TSYGKLT | | | | TTEAFF | 1719 |
| | | | | | | | | F | | | | | |
| BG3 | Non-Naïve | MART1- | 0 | 0 | 0 | 0 | | | | | | | |
| | Endogenous | A2L | | | | | | | | | | | |
| BG4 | Non-Naïve | MART1- | 0 | 0 | 0 | 0 | 12-2*01 | CALPSGN | | | 6-1*01 | CASSDPG | 1623 |
| | Endogenous | A2L | | | | | | TPLVF | | | | SGAYEQY | 1722 |
| | | | | | | | | | | | | F | |
| BH10 | Spike-In | HCV- | HCV- | HCV- | HCV- | HCV- | 38- | CAYRSPP | | | 28*01 | CASSFLG | 1624 |
| | | K1Y | L2I | K1Y17V | K1S | KLV | 2/DV8* | SSEKLVF | | | | TGLNEQY | 1723 |
| | | | | | | | 01 | | | | | F | |
| BH2 | Spike-In | HCV- | HCV- | HCV- | HCV- | HCV- | 38- | CAYRSPP | | | 28*01 | CASSFLG | 1624 |
| | | K1Y | L2I | K1Y17V | K1S | KLV | 2/DV8* | SSEKLVF | | | | TGLNEQY | 1723 |
| | | | | | | | 01 | | | | | F | |
| BH3 | Spike-In | HCV- | HCV- | HCV- | HCV- | HCV- | 38- | CAYRSPP | | | 28*01 | CASSFLG | 1624 |
| | | K1Y | L2I | K1Y17V | K1S | KLV | 2/DV8* | SSEKLVF | | | | TGLNEQY | 1723 |
| | | | | | | | 01 | | | | | F | |
| BH4 | Spike-In | HCV- | HCV- | HCV- | HCV- | HCV- | 38- | CAYRSPP | | | 28*01 | CASSFLG | 1624 |
| | | K1Y | L2I | K1S | K1Y17V | KLV | 2/DV8* | SSEKLVF | | | | TGLNEQY | 1723 |
| | | | | | | | 01 | | | | | F | |
| BH5 | Spike-In | HCV- | HCV- | HCV- | HCV- | HCV- | 38- | CAYRSPP | | | 28*01 | CASSFLG | 1624 |
| | | K1Y | L2I | K1Y17V | K1S | KLV | 2/DV8* | SSEKLVF | | | | TGLNEQY | 1723 |
| | | | | | | | 01 | | | | | F | |
| BH6 | Spike-In | HCV- | HCV- | HCV- | HCV- | HCV- | 38- | CAYRSPP | | | 28*01 | CASSFLG | 1624 |
| | | K1Y | L2I | K1S | K1Y17V | KLV | 2/DV8* | SSEKLVF | | | | TGLNEQY | 1723 |
| | | | | | | | 01 | | | | | F | |
| BH7 | Spike-In | HCV- | HCV- | HCV- | HCV- | HCV- | 38- | CAYRSPP | | | 28*01 | CASSFLG | 1624 |
| | | K1Y | L2I | K1Y17V | K1S | KLV | 2/DV8* | SSEKLVF | | | | TGLNEQY | 1723 |
| | | | | | | | 01 | | | | | F | |
| BH8 | Spike-In | HCV- | HCV- | HCV- | HCV- | HCV- | 38- | CAYRSPP | | | 28*01 | CASSFLG | 1624 |
| | | K1Y | L2I | K1Y17V | K1S | KLV | 2/DV8* | SSEKLVF | | | | TGLNEQY | 1723 |
| | | | | | | | 01 | | | | | F | |

TABLE 4
TetTCR summary for experiment 2

| | | | | | | |
|---|---|---|---|---|---|---|
| | | | | | | SEQ ID |
| Cell | Sorted | Detected Peptide by MID Count | TCRα,1 | TCRα,2 | TCRβ | NO (L |

| Name | Population | Rank 1 | Rank 2 | Rank 3 | Rank 4 | Rank 5 | TRAV | CDR3α | TRAV | CDR3α | TRBV | CDR3β | to R) |
|---|---|---|---|---|---|---|---|---|---|---|---|---|---|
| WA11 | Clone | HCV_K1Y | HCV_L2I | HCV_K1S | HCV_ | HCV_ | 38- | CAYRSPPSSEKL | | | 28 | CASSFLGTGLNE | 1724 |
| | | | | | K1Y17V | KLV | 2/DV8 | VF | | | | QYF | 1889 |
| WB11 | Clone | HCV_K1Y | HCV_L2I | HCV_K1S | HCV_ | HCV_ | 38- | CAYRSPPSSEKL | | | 28 | CASSFLGTGLNE | 1724 |
| | | | | | K1Y17V | KLV | 2/DV8 | VF | | | | QYF | 1889 |
| WC11 | Clone | HCV_K1Y | HCV_K1S | HCV_L2I | HCV_ | HCV_ | 38- | CAYRSPPSSEKL | | | 28 | CASSFLGTGLNE | 1724 |
| | | | | | K1Y17V | KLV | 2/DV8 | VF | | | | QYF | 1889 |
| WD11 | Clone | 0 | 0 | 0 | 0 | 0 | | | | | | | |
| WE11 | Clone | HCV_K1Y | HCV_L2I | HCV_K1S | HCV_ | HCV_ | 38- | CAYRSPPSSEKL | | | 28 | CASSFLGTGLNE | 1724 |
| | | | | | K1Y17V | KLV | 2/DV8 | VF | | | | QYF | 1889 |
| WF11 | Clone | HCV_K1Y | HCV_L2I | HCV_ | HCV_K1S | HCV_ | 38- | CAYRSPPSSEKL | | | 28 | CASSFLGTGLNE | 1724 |
| | | | | K1Y17V | | KLV | 2/DV8 | VF | | | | QYF | 1889 |
| WG11 | Clone | HCV_K1Y | HCV_L2I | HCV_K1S | HCV_ | HCV_ | 38- | CAYRSPPSSEKL | | | 28 | CASSFLGTGLNE | 1724 |
| | | | | | K1Y17V | KLV | 2/DV8 | VF | | | | QYF | 1889 |
| WH11 | Clone | HCV_K1Y | HCV_L2I | HCV_K1S | HCV_ | HCV_ | 38- | CAYRSPPSSEKL | | | 28 | CASSFLGTGLNE | 1724 |
| | | | | | K1Y17V | KLV | 2/DV8 | VF | | | | QYF | 1889 |
| TA1 | Foreign_ | YFV_LLW | 0 | 0 | 0 | 0 | 2- | CAVNSDGQKLLF | | | 3- | CAISEGAAYGYTF | 1725 |
| | Naive | | | | | | Dec | | | | Oct | | 1890 |
| TA2 | Foreign_ | YFV_LLW | 0 | 0 | 0 | 0 | 2- | CAPGDDKIIF | | | 15 | CATSSSGAYEQY | 1726 |
| | Naive | | | | | | Dec | | | | | F | 1891 |
| TA3 | Foreign_ | EBV_YVL | 0 | 0 | 0 | 0 | 17 | CASSGLSSGGSY | | | | | 1727 |
| | Naive | | | | | | | IPTF | | | | | |
| TB1 | Foreign_ | HCV_L2I | 0 | 0 | 0 | 0 | 38- | CAYRLGGSEKLV | | | 13 | CASSFPPAGTGE | 1728 |
| | Naive | | | | | | 2/DV8 | F | | | | LFF | 1892 |
| TB2 | Foreign_ | CMV_MLN | 0 | 0 | 0 | 0 | 14/DV4 | CAMRGGLYNFNK | | | 1- | CASSPQGQGESG | 1729 |
| | Naive | | | | | | | FYF | | | Apr | ANVLTF | 1893 |
| TB3 | Foreign_ | YFV_LLW | 0 | 0 | 0 | 0 | 2- | CAVTDYKLSF | 5 | CAGRSYNT | 1- | CASSEALYEQYF | 1730 |
| | Naive | | | | | | Dec | | | NAGKSTF | Jun | | 1879 |
| | | | | | | | | | | | | | 1894 |
| TC1 | Foreign_ | YFV_LLW | 0 | 0 | 0 | 0 | 2- | CALQDDKIIF | | | 1- | CASSQGAAYEQY | 1731 |
| | Naive | | | | | | Dec | | | | Apr | F | 1895 |
| TC2 | Foreign_ | 0 | 0 | 0 | 0 | 0 | | | | | 2 | CASSDGVSYGYT | 1896 |
| | Naive | | | | | | | | | | | F | |
| TC3 | Foreign_ | CMV_MLN | 0 | 0 | 0 | 0 | 17 | CATGDLGNQFYF | | | 8- | CASSLGFGYEQF | 1732 |
| | Naive | | | | | | | | | | Jul | F | 1897 |
| TD1 | Foreign_ | YFV_LLW | 0 | 0 | 0 | 0 | | | | | | | |
| | Naive | | | | | | | | | | | | |
| TD2 | Foreign_ | YFV_LLW | HA_VLH | 0 | 0 | 0 | 2- | CAVNSDGQKLLF | | | | | |
| | Naive | | | | | | Dec | | | | | | 1725 |
| TD3 | Foreign_ | EBV_GLC | 0 | 0 | 0 | 0 | | | | | 20-1 | CSARSGVGNTIYF | 1898 |
| | Naive | | | | | | | | | | | | |
| TE1 | Foreign_ | 0 | 0 | 0 | 0 | 0 | 14/DV4 | CAMRELTSGTYK | | | 20-1 | CSPLGGQGVWD | 1733 |
| | Naive | | | | | | | YIF | | | | EQFF | 1899 |
| TE2 | Foreign_ | CMV_NLV | 0 | 0 | 0 | 0 | 24 | CARNTGNQFYF | | | | | 1734 |
| | Naive | | | | | | | | | | | | |
| TE3 | Foreign_ | 0 | 0 | 0 | 0 | 0 | 5 | CAEQGGSARQLT | 2- | CAVSTDK | | | 1735 |
| | Naive | | | | | | | F | Dec | LIF | | | 1880 |
| TF1 | Foreign_ | HCV_LLF | 0 | 0 | 0 | 0 | | | | | 3- | CAISEPGTGDTEA | 1900 |
| | Naive | | | | | | | | | | Oct | FF | |
| TF2 | Foreign_ | IV_GIL | 0 | 0 | 0 | 0 | 17 | CATDAVSGTGGT | | | 19 | CASSIYGAGYTEA | 1736 |
| | Naive | | | | | | | SYGKLTF | | | | FF | 1901 |
| TF3 | Foreign_ | YFV_LLW | 0 | 0 | 0 | 0 | 1- | CVVNDNDMRF | | | 27 | CASSFGASYGYT | 1737 |
| | Naive | | | | | | Dec | | | | | F | 1902 |
| TG1 | Foreign_ | YFV_LLW | HAFP_ | 0 | 0 | 0 | 10 | CVVSPYSRVCTQ | 2- | CAVSNQGGKL | | | 1738 |
| | Naive | | FMN | | | | | L | Dec | IF | | | 1881 |
| TG2 | Foreign_ | YFV_LLW | 0 | 0 | 0 | 0 | 2- | CAVSEDKLSF | | | | | 1739 |
| | Naive | | | | | | Dec | | | | | | |
| TG3 | Foreign_ | YFV_LLW | 0 | 0 | 0 | 0 | 2- | CAVSGGSYIPTF | | | | | 1740 |
| | Naive | | | | | | Dec | | | | | | |
| TH1 | Foreign_ | HSV_SLP | 0 | 0 | 0 | 0 | 2- | CAVGSARQLTF | | | 24-1 | CATSVGSGPLST | 1741 |
| | Naive | | | | | | Dec | | | | | DTQYF | 1903 |
| TH2 | Foreign_ | 0 | 0 | 0 | 0 | 0 | 1- | CVVTASNDMRF | | | 14 | CASSQETSPNYG | 1742 |
| | Naive | | | | | | Dec | | | | | YTF | 1904 |
| | | | | | | | 38- | | | | | | |
| TH3 | Foreign_ | HCV_YLL | 0 | 0 | 0 | 0 | 2/DV8 | CACADYGGSQG | | | | | 1743 |
| | Naive | | | | | | | NLIF | | | | | |
| UA1 | Foreign_ | CMV_NLV | IV_GIL | 0 | 0 | 0 | 24 | CATNTGNQFYF | | | 1- | CASSPTTRTRYY | 1744 |
| | Naive | | | | | | | | | | Jun | GYTF | 1905 |
| UA2 | Foreign_ | YFV_LLW | 0 | 0 | 0 | 0 | 1- | CAFEGGKLIF | | | 20-1 | CSAIGPRGTDTQY | 1745 |
| | Naive | | | | | | Dec | | | | | F | 1906 |
| UA3 | Foreign_ | 0 | 0 | 0 | 0 | 0 | 2- | CAVNNDYKLSF | | | 1- | CASSQEMASVQE | 1746 |
| | Naive | | | | | | Dec | | | | Mar | TQYF | 1907 |
| UB1 | Foreign_ | YFV_LLW | 0 | 0 | 0 | 0 | 2- | CAVTGNQFYF | | | 2- | CASSLGGQGAYE | 1747 |
| | Naive | | | | | | Dec | | | | Nov | QYF | 1908 |
| UB2 | Foreign_ | YFV_LLW | 0 | 0 | 0 | 0 | 2- | CAGNNARLMF | | | 15 | CATSPRGGHEQY | 1748 |
| | Naive | | | | | | Dec | | | | | F | 1909 |
| UB3 | Foreign_ | HCV_LLF | 0 | 0 | 0 | 0 | 38-1 | CALDAGNMLTF | | | 28 | CASLGLEYEQYF | 1749 |
| | Naive | | | | | | | | | | | | 1910 |
| UC1 | Foreign_ | YFV_LLW | 0 | 0 | 0 | 0 | 2- | CAAGDARLMF | | | | | 1750 |
| | Naive | | | | | | Dec | | | | | | |
| UC2 | Foreign_ | IVPA_FMY | 0 | 0 | 0 | 0 | 38- | CAYIWGDKIIF | | | | | 1751 |
| | Naive | | | | | | 2/DV8 | | | | | | |
| UC3 | Foreign_ | YFV_LLW | 0 | 0 | 0 | 0 | 39 | CAVDSGDMRF | | | | | 1752 |
| | Naive | | | | | | | | | | | | |
| UD1 | Foreign_ | YFV_LLW | 0 | 0 | 0 | 0 | | | | | | | |
| | Naive | | | | | | | | | | | | |
| UD2 | Foreign_ | 0 | 0 | 0 | 0 | 0 | 38- | CAYYGGSQGNLI | | | 13 | CASSATGVSPYE | 1753 |
| | Naive | | | | | | 2/DV8 | F | | | | QYF | 1911 |
| UD3 | Foreign_ | CMV_MLN | 0 | 0 | 0 | 0 | | | | | 19 | CASSQGLSYEQY | 1912 |
| | Naive | | | | | | | | | | | F | |
| UE1 | Foreign_ | 0 | 0 | 0 | 0 | 0 | 2- | CAVITGGGNKLTF | | | 9 | CASSVAGSTEAFF | 1754 |
| | Naive | | | | | | Dec | | | | | | 1913 |
| UE2 | Foreign_ | CMV_MLN | 0 | 0 | 0 | 0 | 3- | CAVGMDSSYKLI | 10 | CVVSAMG | 1- | CASNQPQHF | 1755 |
| | Naive | | | | | | Aug | F | | GGNKLTF | Jun | | 1882 |
| | | | | | | | | | | | | | 1914 |
| UE3 | Foreign_ | CMV_MLN | 0 | 0 | 0 | 0 | 4 | CLVGDVQEGFQK | | | 20-1 | CSARDPSQGGYE | 1756 |
| | Naive | | | | | | | LVF | | | | QYF | 1915 |
| UF1 | Foreign_ | YFV_LLW | IV_AIM | 0 | 0 | 0 | 1- | CVVADDKIIF | | | 9 | CASSVDGGSQPQ | 1757 |
| | Naive | | | | | | Dec | | | | | HF | 1916 |
| UF2 | Foreign_ | HSV_SLP | 0 | 0 | 0 | 0 | | | | | 2- | CASSLPAGVGDT | 1917 |
| | Naive | | | | | | | | | | Nov | QYF | |
| UF3 | Foreign_ | HCV_L2I | HCV_KLV | 0 | 0 | 0 | 38- | CASLRNMLTF | 38- | CALLDGN | 19 | CASSIGLNQPQHF | 1758 |
| | Naive | | | | | | 2/DV8 | | 2/DV8 | KLVF | | | 1883 |
| | | | | | | | | | | | | | 1918 |
| UG1 | Foreign_ | YFV_LLW | 0 | 0 | 0 | 0 | 24 | CARNTGNQFYF | | | 9 | CASSVGGVPYNE | 1734 |
| | Naive | | | | | | | | | | | QFF | 1919 |
| UG2 | Foreign_ | CMV_MLN | 0 | 0 | 0 | 0 | 2- | CVVSVSGGYNKL | | | 2- | CASSLVESEQFF | 1759 |
| | Naive | | | | | | Aug | IF | | | Nov | | 1920 |
| UG3 | Foreign_ | 0 | 0 | 0 | 0 | 0 | 14/DV4 | CAMRVRTWGQN | | | 12- | CASSFANSPLHF | 1760 |
| | Naive | | | | | | | FVF | | | 3,12- | | 1921 |
| | | | | | | | | | | | 4 | | |
| UH1 | Foreign_ | YFV_LLW | 0 | 0 | 0 | 0 | 1- | CVVSDDKIIF | | | 27 | CASSLTALGAAYV | 1761 |
| | Naive | | | | | | Dec | | | | | YTF | 1922 |
| UH2 | Foreign_ | HCV_L2I | 0 | 0 | 0 | 0 | | | | | | | |
| | Naive | | | | | | | | | | 20-1 | CSATEGSGYTF | 1923 |
| UH3 | Foreign_ | YFV_LLW | 0 | 0 | 0 | 0 | | | | | 13 | CASSRRDSNTEA | 1924 |
| | Naive | | | | | | | | | | | FF | |
| VA1 | Foreign_ | YFV_LLW | 0 | 0 | 0 | 0 | 39 | CAWYSGGGADG | | | 5- | CASSFWGADTQY | 1762 |
| | Naive | | | | | | | LTF | | | May | F | 1925 |
| VA2 | Foreign_ | IV_GIL | 0 | 0 | 0 | 0 | 2- | CAVSPFGNVLHC | | | 2 | CASTGQNPEAFF | 1763 |
| | Naive | | | | | | Dec | | | | | | 1926 |
| VA3 | Foreign_ | HSV_SLP | 0 | 0 | 0 | 0 | 4- | CAVSETGAGNNR | 41 | CAVEGSR | 1- | CASSEVRGPWAE | 1764 |
| | Naive | | | | | | Aug | KLIW | | LTF | Jun | TQYF | 1863 |
| | | | | | | | | | | | | | 1927 |
| VB1 | Foreign_ | YFV_LLW | 0 | 0 | 0 | 0 | 2- | CAVSDDKIIF | | | 15 | CATSRTGTGSTE | 1765 |
| | Naive | | | | | | Dec | | | | | AFF | 1928 |
| VB2 | Foreign_ | 0 | 0 | 0 | 0 | 0 | | | | | | | |
| | Naive | | | | | | | | | | | | |
| VB3 | Foreign_ | IVPA_FMY | 0 | 0 | 0 | 0 | | | | | 3- | CASSPTGTGYNE | 1929 |
| | Naive | | | | | | | | | | Apr | QFF | |
| VC1 | Foreign_ | YFV_LLW | 0 | 0 | 0 | 0 | 2- | CAVRLGGADGLT | | | 20-1 | CSAWWGAEQYF | 1766 |
| | Naive | | | | | | Dec | F | | | | | 1930 |
| VC2 | Foreign_ | YFV_LLW | 0 | 0 | 0 | 0 | 14/DV4 | CAMRSSDPGGY | | | 19 | CASSIQGRGDTE | 1767 |
| | Naive | | | | | | | NKLIF | | | | AFF | 1931 |
| VC3 | Foreign_ | HAFP_GLS | HTLV_LLF | 0 | 0 | 0 | 1- | CVVNGGGYQKV | | | 9 | CASSAGLFPEQFF | 1768 |
| | Naive | | | | | | Dec | TF | | | | | 1932 |
| VD1 | Foreign_ | IV_GIL | 0 | 0 | 0 | 0 | 3- | CAMSQDYNTDKL | | | 2 | CASRTRQEAFF | 1769 |
| | Naive | | | | | | Dec | IF | | | | | 1933 |
| VD2 | Foreign_ | EBV_YVL | 0 | 0 | 0 | 0 | | | | | 19 | CASSIVGNTEAFF | 1934 |
| | Naive | | | | | | | | | | | | |
| VD3 | Foreign_ | ALADH_VLM | 0 | 0 | 0 | 0 | | | | | 8- | CASSFWGLGELF | 1935 |
| | Naive | | | | | | | | | | Jul | F | |
| VE1 | Foreign_ | YFV_LLW | 0 | 0 | 0 | 0 | 2- | CAVTNDKIIF | | | 9 | CASSPMNEQFF | 1770 |
| | Naive | | | | | | Dec | | | | | | 1936 |
| VE2 | Foreign_ | YFV_LLW | 0 | 0 | 0 | 0 | 27 | CAGASTGDYKLS | | | 25-1 | CASGRGPNYGYT | 1771 |
| | Naive | | | | | | | F | | | | F | 1937 |
| VE3 | Foreign_ | HPV_YML | 0 | 0 | 0 | 0 | | | | | 1- | CASSLLGLIKETQ | 1938 |
| | Naive | | | | | | | | | | May | YF | |
| VF1 | Foreign_ | YFV_LLW | 0 | 0 | 0 | 0 | | | | | 9 | CASSDSYEQYF | 1939 |
| | Naive | | | | | | | | | | | | |
| VF2 | Foreign_ | YFV_LLW | 0 | 0 | 0 | 0 | 2- | CAVVGGYNKLIF | | | 1- | CASSPGQVSYEQ | 1772 |
| | Naive | | | | | | Dec | | | | Mar | YF | 1940 |
| VF3 | Foreign_ | EBV_YVL | 0 | 0 | 0 | 0 | 2- | CAVITGGGNKLTF | | | 1- | CASSLAGGGEQY | 1754 |
| | Naive | | | | | | Dec | | | | May | F | 1941 |
| VG1 | Foreign_ | IV_GIL | 0 | 0 | 0 | 0 | 38- | CDPSGGNNRKLI | | | 19 | CASSVYSGGYNE | 1773 |
| | Naive | | | | | | 2/DV8 | W | | | | QFF | 1942 |
| VG2 | Foreign_ | 0 | 0 | 0 | 0 | 0 | 29/DV5 | CAATQGGSEKLV | | | 9 | CASSVGVGTDTQ | 1774 |
| | Naive | | | | | | | F | | | | YF | 1943 |
| VG3 | Foreign_ | EBV_YVL | 0 | 0 | 0 | 0 | | | | | 29-1 | CSVDNKAGGGYT | 1944 |
| | Naive | | | | | | | | | | | F | |
| VH1 | Foreign_ | HCV_A9N | 0 | 0 | 0 | 0 | 38- | CAYGSNNNDMR | | | 5- | CASSYSPGTGNTI | 1775 |
| | Naive | | | | | | 2/DV8 | F | | | Jun | YF | 1945 |
| VH2 | Foreign_ | YFV_LLW | 0 | 0 | 0 | 0 | 2- | CAVSDDKIIF | | | 1- | CASSEGPGQGSY | 1765 |
| | Naive | | | | | | Dec | | | | Jun | EQYF | 1946 |
| VH3 | Foreign_ | YFV_LLW | MART1_ | 0 | 0 | 0 | 2- | CAVNNARLMF | | | | | 1776 |
| | Naive | | A2L | | | | Dec | | | | | | |
| WA1 | Foreign_ | YFV_LLW | 0 | 0 | 0 | 0 | | | | | 2 | CASSEAFGRPNY | 1947 |
| | Naive | | | | | | | | | | | GYTF | |
| WA2 | Foreign_ | 0 | 0 | 0 | 0 | 0 | 3- | CAVGAGPGAGS | | | 1- | CASRSHPTYEQY | 1777 |
| | Naive | | | | | | Aug | YQLTF | | | Jun | F | 1948 |
| WA3 | Foreign_ | HSV_SLP | 0 | 0 | 0 | 0 | 14/DV4 | CAMREGTTDSW | | | 20-1 | CSARDLGLHQPQ | 1778 |
| | Naive | | | | | | | GKLQF | | | | HF | 1949 |
| WB1 | Foreign_ | YFV_LLW | 0 | 0 | 0 | 0 | 2- | CAVDRDDKIIF | | | 27 | CASSFDLAGVNY | 1779 |
| | Naive | | | | | | Dec | | | | | EQYF | 1950 |
| WB2 | Foreign_ | 0 | 0 | 0 | 0 | 0 | 17 | CASSGLSSGGSY | | | 1- | CASSPLRGPADR | 1727 |
| | Naive | | | | | | | IPTF | | | Mar | TGTEAFF | 1951 |
| WB3 | Foreign_ | CMV_MLN | 0 | 0 | 0 | 0 | 20 | CAVQAADSSASK | | | 2- | CASSFWAGGWT | 1780 |
| | Naive | | | | | | | IIF | | | Jul | EAFF | 1952 |
| WC1 | Foreign_ | YFV_LLW | 0 | 0 | 0 | 0 | | | | | 5- | CASSYGSNYGYT | 1953 |
| | Naive | | | | | | | | | | Jun | F | |
| WC2 | Foreign_ | HCV_LLF | 0 | 0 | 0 | 0 | 4 | CLVGGYSGGYQ | 3 | CAVRDMHP | 15 | CATRGGEGQPQH | 1781 |
| | Naive | | | | | | | KVTF | | RGYNKLIF | | F | 1884 |
| | | | | | | | | | | | | | 1954 |
| WC3 | Foreign_ | HTLV_LLF | HAFP_GLS | 0 | 0 | 0 | 3 | CAVRDYGNNRLA | | | | | 1782 |
| | Naive | | | | | | | F | | | | | |
| WD1 | Foreign_ | HCV_YLL | 0 | 0 | 0 | 0 | | | | | 1- | CASSLGDWDLEA | 1955 |
| | Naive | | | | | | | | | | Nov | FF | |
| WD2 | Foreign_ | YFV_LLW | 0 | 0 | 0 | 0 | 25 | CAGIDNAGNMLT | | | | | 1783 |
| | Naive | | | | | | | F | | | | | |
| WD3 | Foreign_ | YFV_LLW | 0 | 0 | 0 | 0 | 29/DV5 | CAAKDNRKLIW | | | 27 | CASGPGTAYGYT | 1784 |
| | Naive | | | | | | | | | | | F | 1956 |
| WE1 | Foreign_ | CMV_MLN | 0 | 0 | 0 | 0 | 4 | CLAFSGGYNKLIF | | | 27 | CASSLGPAYNEQ | 1785 |
| | Naive | | | | | | | | | | | FF | 1957 |
| WE2 | Foreign_ | YFV_LLW | 0 | 0 | 0 | 0 | 24 | CASSTDSWGKLQ | | | 2- | CASSHDAGASTG | 1786 |
| | Naive | | | | | | | F | | | Apr | ELFF | 1958 |
| WE3 | Foreign_ | YFV_LLW | 0 | 0 | 0 | 0 | | | | | 6-2,6- | CASSSGAAYEQY | 1959 |
| | Naive | | | | | | | | | | 3 | F | |
| WF1 | Foreign_ | CMV_MLN | 0 | 0 | 0 | 0 | 19 | CALSEAGYGNNR | | | 2 | CASSESFPASGG | 1787 |
| | Naive | | | | | | | LAF | | | | STDTQYF | 1960 |
| WF2 | Foreign_ | CMV_NLV | 0 | 0 | 0 | 0 | 3 | CAVNYGNMLTF | 14/DV4 | CAMRAFGA | 5- | CASSYATEVAGE | 1788 |
| | Naive | | | | | | | | | DGQKLLF | Jun | TQYF | 1885 |
| | | | | | | | | | | | | | 1961 |
| WF3 | Foreign_ | CMV_MLN | 0 | 0 | 0 | 0 | 14/DV4 | CAMREGMDSSY | | | 2 | CASMTNNQPQHF | 1789 |
| | Naive | | | | | | | KLIF | | | | | 1962 |
| WG1 | Foreign_ | YFV_LLW | 0 | 0 | 0 | 0 | 2- | CAVIGSGKLIF | | | 1- | CASSQTAGGYEQ | 1790 |
| | Naive | | | | | | Dec | | | | Apr | YF | 1963 |
| WG2 | Foreign_ | YFV_LLW | 0 | 0 | 0 | 0 | | | | | 9 | CASSVGGVSYNE | 1964 |
| | Naive | | | | | | | | | | | QFF | |
| WG3 | Foreign_ | EBV_YVL | 0 | 0 | 0 | 0 | 17 | CASSGLSSGGSY | | | 1- | CASSPLRGPADR | 1727 |
| | Naive | | | | | | | IPTF | | | Mar | TGTEAFF | 1951 |
| WH1 | Foreign_ | YFV_LLW | 0 | 0 | 0 | 0 | | | | | 2- | CASSQVSSTGEL | 1965 |
| | Naive | | | | | | | | | | Apr | FF | |
| WH2 | Foreign_ | CMV_MLN | 0 | 0 | 0 | 0 | 27 | CAGASSNTGKLIF | | | | | 1791 |
| | Naive | | | | | | | | | | | | |
| WH3 | Foreign_ | HBV_WLS | 0 | 0 | 0 | 0 | 2- | CAVMADGQKLLF | | | 6- | CASSQTIGTGFSN | 1792 |
| | Naive | | | | | | Dec | | | | May | EQFF | 1966 |
| TA7 | Foreign_ | CMV_NLV | 0 | 0 | 0 | 0 | 26-2 | CILSNNNDMRF | | | 30 | CAWSISDSSRVE | 1793 |
| | Nonnaive | | | | | | | | | | | AFF | 1967 |
| TA8 | Foreign_ | CMV_NLV | 0 | 0 | 0 | 0 | 35 | CAAPRETSYDKVI | | | | | 1794 |
| | Nonnaive | | | | | | | F | | | | | |
| TA9 | Foreign_ | CMV_NLV | 0 | 0 | 0 | 0 | 35 | CAAPRETSYDKVI | | | | | 1794 |
| | Nonnaive | | | | | | | F | | | | | |
| TB7 | Foreign_ | CMV_NLV | 0 | 0 | 0 | 0 | 26-2 | CILSNNNDMRF | | | | | 1793 |
| | Nonnaive | | | | | | | | | | | | |
| TB8 | Foreign_ | EBV_YVL | 0 | 0 | 0 | 0 | 17 | CASSGLSSGGSY | | | 1- | CASSPLRGPADR | 1727 |
| | Nonnaive | | | | | | | IPTF | | | Mar | TGTEAFF | 1951 |
| TB9 | Foreign_ | CMV_NLV | 0 | 0 | 0 | 0 | 35 | CAAPRETSYDKVI | | | 12- | CASSSANYGYTF | 1794 |
| | Nonnaive | | | | | | | F | | | 3,12- | | 1968 |
| | | | | | | | | | | | 4 | | |
| TC7 | Foreign_ | CMV_NLV | 0 | 0 | 0 | 0 | 26-2 | CILSNNNDMRF | | | | | 1793 |
| | Nonnaive | | | | | | | | | | | | |
| TC8 | Foreign_ | CMV_NLV | 0 | 0 | 0 | 0 | | | | | | | |
| | Nonnaive | | | | | | | | | | | | |
| TC9 | Foreign_ | EBV_YVL | 0 | 0 | 0 | 0 | 17 | CASSGLSSGGSY | | | 1- | CASSPLRGPADR | 1727 |
| | Nonnaive | | | | | | | IPTF | | | Mar | TGTEAFF | 1951 |
| TD7 | Foreign_ | CMV_NLV | 0 | 0 | 0 | 0 | 35 | CAGPTKTSYDKVI | | | 12- | CASSSANYGYTF | 1795 |
| | Nonnaive | | | | | | | F | | | 3,12- | | 1968 |
| | | | | | | | | | | | 4 | | |
| TD8 | Foreign_ | EBV_YVL | 0 | 0 | 0 | 0 | 17 | CASSGLSSGGSY | | | 1- | CASSPLRGPADR | 1727 |
| | Nonnaive | | | | | | | IPTF | | | Mar | TGTEAFF | 1951 |
| TD9 | Foreign_ | CMV_NLV | 0 | 0 | 0 | 0 | 35 | CAAPRETSYDKVI | | | 12- | CASSSANYGYTF | 1794 |
| | Nonnaive | | | | | | | F | | | 3,12- | | 1968 |
| | | | | | | | | | | | 4 | | |
| TE7 | Foreign_ | CMV_NLV | 0 | 0 | 0 | 0 | 35 | CAAPRETSYDKVI | | | 12- | CASSSANYGYTF | 1794 |
| | Nonnaive | | | | | | | F | | | 3,12- | | 1968 |
| | | | | | | | | | | | 4 | | |
| TE8 | Foreign_ | CMV_NLV | 0 | 0 | 0 | 0 | 35 | CAGPTKTSYDKVI | | | 12- | CASSSANYGYTF | 1795 |
| | Nonnaive | | | | | | | F | | | 3,12- | | 1968 |
| | | | | | | | | | | | 4 | | |
| TE9 | Foreign_ | EBV_YVL | 0 | 0 | 0 | 0 | 17 | CATGLNYGGSQ | | | 2- | CASSLFNQETQY | 1796 |
| | Nonnaive | | | | | | | GNLIF | | | Oct | F | 1969 |
| TF7 | Foreign_ | CMV_NLV | 0 | 0 | 0 | 0 | 26-2 | CILSNNNDMRF | | | 30 | CAWSISDSSRVE | 1793 |
| | Nonnaive | | | | | | | | | | | AFF | 1967 |
| TF8 | Foreign_ | CMV_NLV | 0 | 0 | 0 | 0 | 3 | CAVFYGNKLVF | | | 5- | CASSYATGIPDTQ | 1797 |
| | Nonnaive | | | | | | | | | | Jun | YF | 1970 |
| TF9 | Foreign_ | EBV_YVL | 0 | 0 | 0 | 0 | 17 | CASSGLSSGGSY | | | 1- | CASSPLRGPADR | 1727 |
| | Nonnaive | | | | | | | IPTF | | | Mar | TGTEAFF | 1951 |
| TG7 | Foreign_ | CMV_NLV | 0 | 0 | 0 | 0 | 35 | CAAPRETSYDKVI | | | 12- | CASSSANYGYTF | 1794 |
| | Nonnaive | | | | | | | F | | | 3,12- | | 1968 |
| | | | | | | | | | | | 4 | | |
| TG8 | Foreign_ | EBV_YVL | 0 | 0 | 0 | 0 | 17 | CASSGLSSGGSY | | | 1- | CASSPLRGPADR | 1727 |
| | Nonnaive | | | | | | | IPTF | | | Mar | TGTEAFF | 1951 |
| TG9 | Foreign_ | CMV_NLV | 0 | 0 | 0 | 0 | 26-2 | CILSNNNDMRF | | | 30 | CAWSISDSSRVE | 1793 |
| | Nonnaive | | | | | | | | | | | AFF | 1967 |
| TH7 | Foreign_ | 0 | 0 | 0 | 0 | 0 | | | | | | | |
| | Nonnaive | | | | | | | | | | | | |
| TH8 | Foreign_ | CMV_NLV | 0 | 0 | 0 | 0 | | | | | | | |
| | Nonnaive | | | | | | | | | | | | |
| TH9 | Foreign_ | EBV_YVL | 0 | 0 | 0 | 0 | | | | | | | |
| | Nonnaive | | | | | | | | | | | | |
| UA7 | Foreign_ | CMV_NLV | 0 | 0 | 0 | 0 | | | | | | | |
| | Nonnaive | | | | | | | | | | | | |
| UA8 | Foreign_ | CMV_NLV | 0 | 0 | 0 | 0 | 3 | CAVFYGNKLVF | | | 5- | CASSYATGIPDTQ | 1797 |
| | Nonnaive | | | | | | | | | | Jun | YF | 1970 |
| UA9 | Foreign_ | CMV_NLV | 0 | 0 | 0 | 0 | 35 | CAAPRETSYDKVI | | | 12- | CASSSANYGYTF | 1794 |
| | Nonnaive | | | | | | | F | | | 3,12- | | 1968 |
| | | | | | | | | | | | 4 | | |
| UB7 | Foreign_ | CMV_NLV | 0 | 0 | 0 | 0 | 35 | CAAPRETSYDKVI | | | 12- | CASSSANYGYTF | 1794 |
| | Nonnaive | | | | | | | F | | | 3,12- | | 1968 |
| | | | | | | | | | | | 4 | | |
| UB8 | Foreign_ | CMV_NLV | 0 | 0 | 0 | 0 | 26-2 | CILSNNNDMRF | | | 30 | CAWSISDSSRVE | 1793 |
| | Nonnaive | | | | | | | | | | | AFF | 1967 |
| UB9 | Foreign_ | CMV_NLV | 0 | 0 | 0 | 0 | | | | | 12- | CASSSANYGYTF | 1968 |
| | Nonnaive | | | | | | | | | | 3,12- | | |
| | | | | | | | | | | | 4 | | |
| UC7 | Foreign_ | EBV_YVL | 0 | 0 | 0 | 0 | | | | | 1- | CASSPLRGPADR | 1951 |
| | Nonnaive | | | | | | | | | | Mar | TGTEAFF | |
| UC8 | Foreign_ | CMV_NLV | 0 | 0 | 0 | 0 | | | | | | | |
| | Nonnaive | | | | | | | | | | | | |
| UC9 | Foreign_ | CMV_NLV | 0 | 0 | 0 | 0 | | | | | | | |
| | Nonnaive | | | | | | | | | | | | |
| UD7 | Foreign_ | CMV_NLV | 0 | 0 | 0 | 0 | 26-2 | CILSNNNDMRF | | | | | 1793 |
| | Nonnaive | | | | | | | | | | | | |
| UD8 | Foreign_ | CMV_NLV | 0 | 0 | 0 | 0 | | | | | | | |
| | Nonnaive | | | | | | | | | | | | |
| UD9 | Foreign_ | CMV_NLV | 0 | 0 | 0 | 0 | | | | | 12- | CASSSANYGYTF | 1968 |
| | Nonnaive | | | | | | | | | | 3,12- | | |
| | | | | | | | | | | | 4 | | |
| UE7 | Foreign_ | CMV_NLV | 0 | 0 | 0 | 0 | 35 | CAAPRETSYDKVI | | | 12- | CASSSANYGYTF | 1794 |
| | Nonnaive | | | | | | | F | | | 3,12- | | 1968 |
| | | | | | | | | | | | 4 | | |
| UE8 | Foreign_ | CMV_NLV | 0 | 0 | 0 | 0 | 3 | CAVFYGNKLVF | | | 5- | CASSYATGIPDTQ | 1797 |
| | Nonnaive | | | | | | | | | | Jun | YF | 1970 |
| UE9 | Foreign_ | CMV_NLV | 0 | 0 | 0 | 0 | 35 | CAAPRETSYDKVI | | | 12- | CASSSANYGYTF | 1794 |
| | Nonnaive | | | | | | | F | | | 3,12- | | 1968 |
| | | | | | | | | | | | 4 | | |
| UF7 | Foreign_ | CMV_NLV | 0 | 0 | 0 | 0 | 35 | CAAPRETSYDKVI | | | 12- | CASSSANYGYTF | 1794 |
| | Nonnaive | | | | | | | F | | | 3,12- | | 1968 |
| | | | | | | | | | | | 4 | | |
| UF8 | Foreign_ | CMV_NLV | 0 | 0 | 0 | 0 | 35 | CAAPRETSYDKVI | | | 12- | CASSSANYGYTF | 1794 |
| | Nonnaive | | | | | | | F | | | 3,12- | | 1968 |
| | | | | | | | | | | | 4 | | |
| UF9 | Foreign_ | CMV_NLV | 0 | 0 | 0 | 0 | | | | | | | |
| | Nonnaive | | | | | | | | | | | | |
| UG7 | Foreign_ | 0 | 0 | 0 | 0 | 0 | 4- | CAVSDLNYGQNF | | | 9- | CASTYGGGALNE | 1798 |
| | Nonnaive | | | | | | Aug | VF | | | Jul | QFF | 1971 |
| UG8 | Foreign_ | CMV_NLV | 0 | 0 | 0 | 0 | 35 | CAAPRETSYDKVI | | | 12- | CASSSANYGYTF | 1794 |
| | Nonnaive | | | | | | | F | | | 3,12- | | 1968 |
| | | | | | | | | | | | 4 | | |
| UG9 | Foreign_ | CMV_NLV | 0 | 0 | 0 | 0 | 26-2 | CILSNNNDMRF | | | 30 | CAWSISDSSRVE | 1793 |
| | Nonnaive | | | | | | | | | | | AFF | 1967 |
| UH7 | Foreign_ | CMV_NLV | 0 | 0 | 0 | 0 | 26-2 | CILSNNNDMRF | | | | | 1793 |
| | Nonnaive | | | | | | | | | | | | |
| UH8 | Foreign_ | EBV_YVL | 0 | 0 | 0 | 0 | | | | | 1- | CASSPLRGPADR | 1951 |
| | Nonnaive | | | | | | | | | | Mar | TGTEAFF | |
| UH9 | Foreign_ | CMV_NLV | 0 | 0 | 0 | 0 | 3 | CAVFYGNKLVF | | | 5- | CASSYATGIPDTQ | 1797 |
| | Nonnaive | | | | | | | | | | Jun | YF | 1970 |
| VA7 | Foreign_ | CMV_NLV | 0 | 0 | 0 | 0 | 35 | CAAPRETSYDKVI | | | 12- | CASSSANYGYTF | 1794 |
| | Nonnaive | | | | | | | F | | | 3,12- | | 1968 |
| | | | | | | | | | | | 4 | | |
| VA8 | Foreign_ | CMV_NLV | 0 | 0 | 0 | 0 | 35 | CAGPTKTSYDKVI | | | 12- | CASSSANYGYTF | 1795 |
| | Nonnaive | | | | | | | F | | | 3,12- | | 1968 |
| | | | | | | | | | | | 4 | | |
| VA9 | Foreign_ | CMV_NLV | 0 | 0 | 0 | 0 | 35 | CAAPRETSYDKVI | | | 12- | CASSSANYGYTF | 1794 |
| | Nonnaive | | | | | | | F | | | 3,12- | | 1968 |
| | | | | | | | | | | | 4 | | |
| VB7 | Foreign_ | CMV_NLV | 0 | 0 | 0 | 0 | 35 | CAAPRETSYDKVI | | | | | 1794 |
| | Nonnaive | | | | | | | F | | | | | |
| VB8 | Foreign_ | CMV_NLV | 0 | 0 | 0 | 0 | 26-2 | CILSNNNDMRF | | | 30 | CAWSISDSSRVE | 1793 |
| | Nonnaive | | | | | | | | | | | AFF | 1967 |
| VB9 | Foreign_ | CMV_NLV | 0 | 0 | 0 | 0 | 26-2 | CILSNNNDMRF | | | | | 1793 |
| | Nonnaive | | | | | | | | | | | | |
| VC7 | Foreign_ | CMV_NLV | 0 | 0 | 0 | 0 | 35 | CAAPRETSYDKVI | | | 12- | CASSSANYGYTF | 1794 |
| | Nonnaive | | | | | | | F | | | 3,12- | | 1968 |
| | | | | | | | | | | | 4 | | |
| VC8 | Foreign_ | EBV_YVL | 0 | 0 | 0 | 0 | 17 | CASSGLSSGGSY | | | 1- | CASSPLRGPADR | 1727 |
| | Nonnaive | | | | | | | IPTF | | | Mar | TGTEAFF | 1951 |
| VC9 | Foreign_ | CMV_NLV | 0 | 0 | 0 | 0 | 35 | CAAPRETSYDKVI | | | 12- | CASSSANYGYTF | 1794 |
| | Nonnaive | | | | | | | F | | | 3,12- | | 1968 |
| | | | | | | | | | | | 4 | | |
| VD7 | Foreign_ | CMV_NLV | 0 | 0 | 0 | 0 | | | | | 12- | CASSSANYGYTF | 1968 |
| | Nonnaive | | | | | | | | | | 3,12- | | |
| | | | | | | | | | | | 4 | | |
| VD8 | Foreign_ | CMV_NLV | 0 | 0 | 0 | 0 | 35 | CAAPRETSYDKVI | | | 12- | CASSSANYGYTF | 1794 |
| | Nonnaive | | | | | | | F | | | 3,12- | | 1968 |
| | | | | | | | | | | | 4 | | |
| VD9 | Foreign_ | CMV_NLV | 0 | 0 | 0 | 0 | | | | | | | |
| | Nonnaive | | | | | | | | | | | | |
| VE7 | Foreign_ | CMV_NLV | 0 | 0 | 0 | 0 | | | | | | | |
| | Nonnaive | | | | | | | | | | | | |
| VE8 | Foreign_ | CMV_NLV | 0 | 0 | 0 | 0 | 3 | CAVFYGNKLVF | | | 5- | CASSYATGIPDTQ | 1797 |
| | Nonnaive | | | | | | | | | | Jun | YF | 1970 |
| VE9 | Foreign_ | CMV_NLV | 0 | 0 | 0 | 0 | 35 | CAAPRETSYDKVI | | | | | 1794 |
| | Nonnaive | | | | | | | F | | | | | |
| VF7 | Foreign_ | CMV_NLV | 0 | 0 | 0 | 0 | 35 | CAAPRETSYDKVI | | | 12- | CASSSANYGYTF | 1794 |
| | Nonnaive | | | | | | | F | | | 3,12- | | 1968 |
| | | | | | | | | | | | 4 | | |
| VF8 | Foreign_ | CMV_NLV | 0 | 0 | 0 | 0 | 26-2 | CILSNNNDMRF | | | 30 | CAWSISDSSRVE | 1793 |
| | Nonnaive | | | | | | | | | | | AFF | 1967 |
| VF9 | Foreign_ | CMV_NLV | 0 | 0 | 0 | 0 | 35 | CAAPRETSYDKVI | | | 12- | CASSSANYGYTF | 1794 |
| | Nonnaive | | | | | | | F | | | 3,12- | | 1968 |
| | | | | | | | | | | | 4 | | |
| VG7 | Foreign_ | EBV_YVL | 0 | 0 | 0 | 0 | 17 | CASSGLSSGGSY | | | 1- | CASSPLRGPADR | 1727 |
| | Nonnaive | | | | | | | IPTF | | | Mar | TGTEAFF | 1951 |
| VG8 | Foreign_ | CMV_NLV | 0 | 0 | 0 | 0 | 24 | CARNTGNQFYF | | | | | 1734 |
| | Nonnaive | | | | | | | | | | | | |
| VG9 | Foreign_ | CMV_NLV | 0 | 0 | 0 | 0 | | | | | 12- | CASSSANYGYTF | 1968 |
| | Nonnaive | | | | | | | | | | 3,12- | | |
| | | | | | | | | | | | 4 | | |
| VH7 | Foreign_ | CMV_NLV | 0 | 0 | 0 | 0 | 35 | CAGPTKTSYDKVI | | | | | 1795 |
| | Nonnaive | | | | | | | F | | | | | |
| VH8 | Foreign_ | CMV_NLV | 0 | 0 | 0 | 0 | | | | | 12- | CASSSANYGYTF | 1968 |
| | Nonnaive | | | | | | | | | | 3,12- | | |
| | | | | | | | | | | | 4 | | |
| VH9 | Foreign_ | CMV_NLV | 0 | 0 | 0 | 0 | | | | | | | |
| | Nonnaive | | | | | | | | | | | | |
| WA7 | Foreign_ | CMV_NLV | 0 | 0 | 0 | 0 | 35 | CAAPRETSYDKVI | | | 12- | CASSSANYGYTF | 1794 |
| | Nonnaive | | | | | | | F | | | 3,12- | | 1968 |
| | | | | | | | | | | | 4 | | |
| WA8 | Foreign_ | 0 | 0 | 0 | 0 | 0 | 17 | CASSGLSSGGSY | | | | | 1727 |
| | Nonnaive | | | | | | | IPTF | | | | | |
| WB7 | Foreign_ | CMV_NLV | 0 | 0 | 0 | 0 | 35 | CAAPRETSYDKVI | | | 12- | CASSSANYGYTF | 1794 |
| | Nonnaive | | | | | | | F | | | 3,12- | | 1968 |
| | | | | | | | | | | | 4 | | |
| WB8 | Foreign_ | CMV_NLV | 0 | 0 | 0 | 0 | 26-2 | CILSNNNDMRF | | | | | 1793 |
| | Nonnaive | | | | | | | | | | | | |
| WC7 | Foreign_ | CMV_NLV | 0 | 0 | 0 | 0 | 35 | CAAPRETSYDKVI | | | 12- | CASSSANYGYTF | 1794 |
| | Nonnaive | | | | | | | F | | | 3,12- | | 1968 |
| | | | | | | | | | | | 4 | | |
| WC8 | Foreign_ | CMV_NLV | 0 | 0 | 0 | 0 | 35 | CAAPRETSYDKVI | | | 12- | CASSSANYGYTF | 1794 |
| | Nonnaive | | | | | | | F | | | 3,12- | | 1968 |
| | | | | | | | | | | | 4 | | |
| WD7 | Foreign_ | CMV_NLV | 0 | 0 | 0 | 0 | 35 | CAAPRETSYDKVI | | | 12- | CASSSANYGYTF | 1794 |
| | Nonnaive | | | | | | | F | | | 3,12- | | 1968 |
| | | | | | | | | | | | 4 | | |
| WD8 | Foreign_ | CMV_NLV | 0 | 0 | 0 | 0 | | | | | 12- | CASSSANYGYTF | 1968 |
| | Nonnaive | | | | | | | | | | 3,12- | | |
| | | | | | | | | | | | 4 | | |
| WE7 | Foreign_ | CMV_NLV | 0 | 0 | 0 | 0 | 35 | CAAPRETSYDKVI | | | 12- | CASSSANYGYTF | 1794 |
| | Nonnaive | | | | | | | F | | | 3,12- | | 1968 |
| | | | | | | | | | | | 4 | | |
| WE8 | Foreign_ | CMV_NLV | 0 | 0 | 0 | 0 | 35 | CAAPRETSYDKVI | | | 12- | CASSSANYGYTF | 1794 |
| | Nonnaive | | | | | | | F | | | 3,12- | | 1968 |
| | | | | | | | | | | | 4 | | |
| WF7 | Foreign_ | CMV_NLV | 0 | 0 | 0 | 0 | 35 | CAAPRETSYDKVI | | | 12- | CASSSANYGYTF | 1794 |
| | Nonnaive | | | | | | | F | | | 3,12- | | 1968 |
| | | | | | | | | | | | 4 | | |
| WF8 | Foreign_ | CMV_NLV | 0 | 0 | 0 | 0 | 35 | CAAPRETSYDKVI | | | 12- | CASSSANYGYTF | 1794 |
| | Nonnaive | | | | | | | F | | | 3,12- | | 1968 |
| | | | | | | | | | | | 4 | | |
| WG7 | Foreign_ | CMV_NLV | 0 | 0 | 0 | 0 | 26-2 | CILSNNNDMRF | | | 30 | CAWSISDSSRVE | 1793 |
| | Nonnaive | | | | | | | | | | | AFF | 1967 |
| WG8 | Foreign_ | CMV_NLV | 0 | 0 | 0 | 0 | 35 | CAAPRETSYDKVI | | | 12- | CASSSANYGYTF | 1794 |
| | Nonnaive | | | | | | | F | | | 3,12- | | 1968 |
| | | | | | | | | | | | 4 | | |
| WH7 | Foreign_ | CMV_NLV | 0 | 0 | 0 | 0 | 3 | CAVFYGNKLVF | | | 5- | CASSYATGIPDTQ | 1797 |
| | Nonnaive | | | | | | | | | | Jun | YF | 1970 |
| WH8 | Foreign_ | 0 | 0 | 0 | 0 | 0 | | | | | | | |
| | Nonnaive | | | | | | | | | | | | |
| TA4 | Self_Naive | TYR_YMD | 0 | 0 | 0 | 0 | 2- | CAVNMFSNYGQ | | | | | 1799 |
| | | | | | | | Dec | NFVF | | | | | |
| TA5 | Self_Naive | DRIP_MLY | 0 | 0 | 0 | 0 | 2- | CALRIGGSTLGRL | | | 12- | CASSASGGRDYG | 1800 |
| | | | | | | | Sep | YF | | | 3,12- | YTF | 1972 |
| | | | | | | | | | | | 4 | | |
| TA6 | Self_Naive | DRIP_MLY | 0 | 0 | 0 | 0 | 1- | CVVNLPNTGFQK | | | 12- | CASRTGTSGGFP | 1801 |
| | | | | | | | Dec | LVF | | | 3,12- | NTGELFF | 1973 |
| | | | | | | | | | | | 4 | | |
| TB4 | Self_Naive | MART1_A2L | 0 | 0 | 0 | 0 | 2- | CAVNVANDMRF | | | 5- | CASSYSIGNTEAF | 1802 |
| | | | | | | | Dec | | | | Jun | F | 1974 |
| TB5 | Self_Naive | MART1_A2L | 0 | 0 | 0 | 0 | 2- | CAVNGGGKLTF | 16 | CAPTIYN | 24-1 | CATSGSYEQYF | 1803 |
| | | | | | | | Dec | | | QGGKLIF | | | 1886 |
| | | | | | | | | | | | | | 1975 |
| TB6 | Self_Naive | PP1_SII | 0 | 0 | 0 | 0 | 2- | CALPNFGNEKLT | | | 5- | CASSYRFDSPLHF | 1804 |
| | | | | | | | Sep | F | | | Jun | | 1976 |
| TC4 | Self_Naive | ZNT8_LLI | 0 | 0 | 0 | 0 | 16 | CALSGSDSWGKL | | | 1- | CASSESTIVQGYN | 1805 |
| | | | | | | | | QF | | | Oct | EQFF | 1977 |
| TC5 | Self_Naive | MART1_A2L | 0 | 0 | 0 | 0 | 2- | CAADNYGQNFVF | | | 30 | CAWSVSGLGYGY | 1806 |
| | | | | | | | Dec | | | | | TF | 1978 |
| TC6 | Self_Naive | DRIP_MLY | 0 | 0 | 0 | 0 | 19 | CALSENTGFQKL | | | | | 1807 |
| | | | | | | | | VF | | | | | |
| TD4 | Self_Naive | MART1_A2L | 0 | 0 | 0 | 0 | 2- | CAAPGNTPLVF | | | 3- | CAISETTGINEQF | 1808 |
| | | | | | | | Dec | | | | Oct | F | 1979 |
| TD5 | Self_Naive | ZNT8_VVT | 0 | 0 | 0 | 0 | 38- | | | | 30 | CAWSGFSRTEAF | 1809 |
| | | | | | | | 2/DV8 | CAYRSVPDMRF | | | | F | 1980 |
| TD6 | Self_Naive | TYR_YMD | 0 | 0 | 0 | 0 | 1- | CVVNFPTNAGKS | | | 14 | CASSLGQGLSYE | 1810 |
| | | | | | | | Dec | TF | | | | QYF | 1981 |
| TE4 | Self_Naive | IGRP_FLW | 0 | 0 | 0 | 0 | 38- | CAYRSALWGAQ | | | 2- | CASSLAENSGNTI | 1811 |
| | | | | | | | 2/DV8 | KLVF | | | Jul | YF | 1982 |
| TE5 | Self_Naive | MART1_A2L | 0 | 0 | 0 | 0 | | | | | | | |
| TE6 | Self_Naive | MART1_A2L | 0 | 0 | 0 | 0 | 2- | CAVKDARLMF | | | | | 1812 |
| | | | | | | | Dec | | | | | | |
| TF4 | Self_Naive | ZNT8_VVT | 0 | 0 | 0 | 0 | 38- | CSLANAGKSTF | | | 2- | CASSLVGGITGEL | 1813 |
| | | | | | | | 2/DV8 | | | | Nov | FF | 1983 |
| TF5 | Self_Naive | ZNT8_VVT | 0 | 0 | 0 | 0 | 3- | CAMSDTNAGKST | | | 27 | CASSTSAGFSNQ | 1814 |
| | | | | | | | Dec | F | | | | PQHF | 1984 |
| TF6 | Self_Naive | 0 | 0 | 0 | 0 | 0 | 24 | CAPDQTGANNLF | | | | | 1815 |
| | | | | | | | | F | | | | | |
| TG4 | Self_Naive | MART1_A2L | 0 | 0 | 0 | 0 | 27 | CAGLNNARLMF | | | 2- | CASSLQGGYGGG | 1816 |
| | | | | | | | | | | | Apr | YTF | 1985 |
| TG5 | Self_Naive | MART1_A2L | 0 | 0 | 0 | 0 | 3- | CAMTLSNFGNEK | | | 4- | CASSDMAGDGYT | 1817 |
| | | | | | | | Dec | LTF | | | Jun | F | 1986 |
| TG6 | Self_Naive | AGL_GLI | 0 | 0 | 0 | 0 | 2- | CAVGEYGNKLVF | | | 4- | CASSPGPYEQYF | 1818 |
| | | | | | | | Dec | | | | May | | 1987 |
| TH4 | Self_Naive | MART1_A2L | 0 | 0 | 0 | 0 | 20 | CAVQTQGGSEKL | | | | | 1819 |
| | | | | | | | | VF | | | | | |
| TH5 | Self_Naive | MART1_A2L | IV_AIM | 0 | 0 | 0 | 20 | CAARGRDDKIIF | | | | | 1820 |
| TH6 | Self_Naive | MART1_A2L | 0 | 0 | 0 | 0 | 3- | CAAFTSGNTPLV | | | 2- | CASSLGGLGQPQ | 1821 |
| | | | | | | | Aug | F | | | Nov | HF | 1988 |
| UA4 | Self_Naive | GP100_YLE | 0 | 0 | 0 | 0 | | | | | 6-2,6- | CASSWAPHYEQY | 1989 |
| | | | | | | | | | | | 3 | F | |
| UA5 | Self_Naive | ZNT8_VVT | 0 | 0 | 0 | 0 | 2- | CVFPNQGGSEKL | | | 1- | CASSQDPGNGNT | 1822 |
| | | | | | | | Dec | VF | | | Mar | IYF | 1990 |
| UA6 | Self_Naive | 0 | 0 | 0 | 0 | 0 | 4- | CAVSVITQGGSE | | | 3- | CASSAGRYEQYF | 1823 |
| | | | | | | | Aug | KLVF | | | Oct | | 1991 |
| UB4 | Self_Naive | MART1_A2L | 0 | 0 | 0 | 0 | | | | | 27 | CASSVGGFGNQP | 1992 |
| | | | | | | | | | | | | QHF | |
| UB5 | Self_Naive | GP100_IMD | 0 | 0 | 0 | 0 | | | | | 15 | CATSTGWRTGTD | 1993 |
| | | | | | | | | | | | | TQYF | |
| UB6 | Self_Naive | MART1_A2L | IGRP_RLL | PPI_RLL | 0 | 0 | 2- | CAVSSYDKVIF | | | 20-1 | CSALTGNQPQHF | 1824 |
| | | | | | | | Dec | | | | | | 1994 |
| UC4 | Self_Naive | NYESO1_ | NYESO1_ | 0 | 0 | 0 | 38- | CALMDSNYQLIW | | | | | 1825 |
| | | 9A | V165 | | | | 2/DV8 | | | | | | |
| UC5 | Self_Naive | ZNT8_VMI | 0 | 0 | 0 | 0 | 2- | CAVSGYSTLTF | | | 29-1 | CSVGLGQTGTEA | 1826 |
| | | | | | | | Dec | | | | | FF | 1995 |
| UC6 | Self_Naive | MART1_A2L | 0 | 0 | 0 | 0 | 27 | CAGSGGGYQKV | 25 | CAGYKLVF | 5- | CASSYSQGVYTG | 1827 |
| | | | | | | | | TF | | | Jun | ELFF | 1887 |
| | | | | | | | | | | | | | 1996 |
| UD4 | Self_Naive | DDX5_YLL | 0 | 0 | 0 | 0 | | | | | 6- | CASSWDYTEQYF | 1997 |
| | | | | | | | | | | | Jun | | |
| UD5 | Self_Naive | ZNT8_LLS | 0 | 0 | 0 | 0 | 2- | | | | 24-1 | CATSDSTGSYGY | 1828 |
| | | | | | | | Dec | CAADSWGKLQF | | | | TF | 1998 |
| UD6 | Self_Naive | MART1_A2L | 0 | 0 | 0 | 0 | | | | | 5- | CASLQGSGSPLH | 1999 |
| | | | | | | | | | | | Jun | F | |
| UE4 | Self_Naive | 0 | 0 | 0 | 0 | 0 | | | | | 4- | CASSVGGLGQPQ | 2000 |
| | | | | | | | | | | | Jun | HF | |
| UE5 | Self_Naive | MART1_A2L | 0 | 0 | 0 | 0 | 2- | CAAPSGNTPLVF | | | 19 | CASSMAGEQYF | 1829 |
| | | | | | | | Dec | | | | | | 2001 |
| UE6 | Self_Naive | PP1_SII | 0 | 0 | 0 | 0 | 17 | CATDGEDDSWG | | | 4- | CASVLGGSSYNE | 1830 |
| | | | | | | | | KLQF | | | May | QFF | 2002 |
| UF4 | Self_Naive | MART1_A2L | 0 | 0 | 0 | 0 | 2- | CAVGGGSQGNLI | | | 1- | CASSPYRTGNIQY | 1831 |
| | | | | | | | Dec | F | | | Mar | F | 2003 |
| UF5 | Self_Naive | ZNT8_LLS | 0 | 0 | 0 | 0 | 2- | CAVNPSNQFYF | | | 2 | CASRGPYHNEQF | 1832 |
| | | | | | | | Dec | | | | | F | 2004 |
| UF6 | Self_Naive | MART1_A2L | 0 | 0 | 0 | 0 | 2- | CAVNLNQAGTALI | | | 2- | CASSQVGSTEAF | 1833 |
| | | | | | | | Dec | F | | | Apr | F | 2005 |
| UG4 | Self_Naive | MAGEA10_ | 0 | 0 | 0 | 0 | 17 | CATDEVDSSYKLI | | | 2 | CASTSYTEAFF | 1834 |
| | | GLY | | | | | | F | | | | | 2006 |
| UG5 | Self_Naive | MART1_A2L | 0 | 0 | 0 | 0 | 3- | CAMSQSNFGNE | | | 18 | CASSPGQSPTNE | 1835 |
| | | | | | | | Dec | KLTF | | | | KLFF | 2007 |
| UG6 | Self_Naive | TYR_YMD | 0 | 0 | 0 | 0 | 17 | CATGFSGAGSYQ | 41 | CAVEGSR | 9- | CASSLVMDNYGY | 1836 |
| | | | | | | | | LTF | | LTF | Jul | TF | 1863 |
| | | | | | | | | | | | | | 2008 |
| UH4 | Self_Naive | ZNT8_VVT | 0 | 0 | 0 | 0 | 3- | CAMSDGGFQKLV | | | | | 1837 |
| | | | | | | | Dec | F | | | | | |
| UH5 | Self_Naive | MART1_A2L | 0 | 0 | 0 | 0 | 2- | | | | 27 | CASSSPGGETQY | 1838 |
| | | | | | | | Dec | CAVNTGFQKLVF | | | | F | 2009 |
| UH6 | Self_Naive | MART1_A2L | 0 | 0 | 0 | 0 | 2- | CAVNRDNFNKFY | | | 9- | CASSPEPGSHEQ | 1839 |
| | | | | | | | Dec | F | | | Jul | YF | 2010 |
| VA4 | Self_Naive | MART1_A2L | 0 | 0 | 0 | 0 | 2- | CAVNNNDMRF | | | | | 1840 |
| | | | | | | | Dec | | | | | | |
| VA5 | Self_Naive | GP100_IMD | 0 | 0 | 0 | 0 | 3 | CAVRYSSASKIIF | | | 27 | CASRPGGGGYTF | 1841 |
| | | | | | | | | | | | | | 2011 |
| VA6 | Self_Naive | MART1_A2L | 0 | 0 | 0 | 0 | 2- | CAAFSGGGADGL | | | 5- | CASMRGAHTGEL | 1842 |
| | | | | | | | Dec | TF | | | Jun | FF | 2012 |
| VB4 | Self_Naive | MART1_A2L | 0 | 0 | 0 | 0 | | | | | | | |
| | | | | | | | | | | | 20-1 | CSASTGLTEAFF | 2013 |
| VB5 | Self_Naive | MART1_A2L | 0 | 0 | 0 | 0 | 2- | CAVGGGYQKVTF | | | | | 1843 |
| | | | | | | | Dec | | | | | | |
| VB6 | Self_Naive | MART1_A2L | 0 | 0 | 0 | 0 | | | | | 2- | CASSLVRDLLFTD | 2014 |
| | | | | | | | | | | | Nov | TQYF | |
| VC4 | Self_Naive | DRIP_MLY | 0 | 0 | 0 | 0 | 3- | CAMSVGGLTGG | | | 12- | CASSLSGQGATN | 1844 |
| | | | | | | | Dec | GNKLTF | | | 3,12- | EKLFF | 2015 |
| | | | | | | | | | | | 4 | | |
| VC5 | Self_Naive | MART1_A2L | 0 | 0 | 0 | 0 | 2- | CAVANAGNMLTF | | | 2- | CASSQEVGLAGE | 1845 |
| | | | | | | | Dec | | | | Apr | TQYF | 2016 |
| VC6 | Self_Naive | MART1_A2L | 0 | 0 | 0 | 0 | 2- | CAVNTGGGADGL | | | 28 | CASTQGDTGELF | 1846 |
| | | | | | | | Dec | TF | | | | F | 2017 |
| VD4 | Self_Naive | DRIP_MLY | 0 | 0 | 0 | 0 | | | | | 12- | CASSSDRAGSPL | 2018 |
| | | | | | | | | | | | 3,12- | HF | |
| | | | | | | | | | | | 4 | | |
| VD5 | Self_Naive | GFAP_NLA | GPC_FVG | 0 | 0 | 0 | 2- | CAAYNAGNMLTF | | | 5- | CASSHRGSGNTIY | 1847 |
| | | | | | | | Jan | | | | May | F | 2019 |
| VD6 | Self_Naive | HCHGA_TLS | 0 | 0 | 0 | 0 | | | | | 1- | CASSLADVGQYD | 2020 |
| | | | | | | | | | | | May | TDTQYF | |
| VE4 | Self_Naive | NYESO1_ | NYESO1_ | 0 | 0 | 0 | | | | | 2 | CASSGPARDTQY | 2021 |
| | | 9A | V165 | | | | | | | | | F | |
| VE5 | Self_Naive | MAGEC2_ | 0 | 0 | 0 | 0 | 2- | CALSLAEGNFNK | | | 1- | CASTWTGEQYF | 1848 |
| | | LLF | | | | | Sep | FYF | | | Jun | | 2022 |
| VE6 | Self_Naive | GP100_YLE | 0 | 0 | 0 | 0 | 17 | CAPGIAGGTSYG | | | 27 | CASSLAYSYEQYF | 1849 |
| | | | | | | | | KLTF | | | | | 2023 |
| VF4 | Self_Naive | MART1_A2L | 0 | 0 | 0 | 0 | | | | | 5- | CASSYETGGSYE | 2024 |
| | | | | | | | | | | | Jun | QYF | |
| VF5 | Self_Naive | MART1_A2L | 0 | 0 | 0 | 0 | 2- | CAVPTFVNTGKLI | | | 28 | CASTYGGLNEQY | 1850 |
| | | | | | | | Dec | F | | | | F | 2025 |
| VF6 | Self_Naive | GP100_IMD | GP100_ | 0 | 0 | 0 | 20 | CAVGRDGNQFYF | | | 19 | CASSTTGGGNYE | 1851 |
| | | | ITD | | | | | | | | | QYF | 2026 |
| VG4 | Self_Naive | IGRP_VLF | 0 | 0 | 0 | 0 | 1- | CAVNGDSGGSN | | | 1- | CASSLWGAGELF | 1852 |
| | | | | | | | Aug | YKLTF | | | Nov | F | 2027 |
| VG5 | Self_Naive | MART1_A2L | 0 | 0 | 0 | 0 | | | | | 2 | CASNGGSYEQYF | 2028 |
| VG6 | Self_Naive | CD1_LLG | 0 | 0 | 0 | 0 | | | | | 27 | CASSLGDTEQFF | 2029 |
| VH4 | Self_Naive | ZNT8_LLS | 0 | 0 | 0 | 0 | 1- | CVVSEEYTNAGK | | | 6- | CASSLERLRVYS | 1853 |
| | | | | | | | Dec | STF | | | May | GYTF | 2030 |
| VH5 | Self_Naive | GP100_IMD | GP100_ | 0 | 0 | 0 | 14/DV4 | CAMREGTGRRAL | | | 2 | CATHGVSSRETQ | 1854 |
| | | | ITD | | | | | TF | | | | YF | 2031 |
| VH6 | Self_Naive | PP1_SII | 0 | 0 | 0 | 0 | 39 | CAGGGSQGNLIF | | | | | 1855 |
| WA4 | Self_Naive | HCHGA_TLS | 0 | 0 | 0 | 0 | | | | | | | |
| WA5 | Self_Naive | MART1_A2L | 0 | 0 | 0 | 0 | 2- | CAVPTNFGNEKL | | | 6- | CASSLEGTGLTDT | 1856 |
| | | | | | | | Dec | TF | | | May | QYF | 2032 |
| WA6 | Self_Naive | MART1_A2L | 0 | 0 | 0 | 0 | 2- | CASTGGKLIF | | | 27 | CASSLSTVFTDTQ | 1857 |
| | | | | | | | Dec | | | | | YF | 2033 |
| WB4 | Self_Naive | DRIP_MLY | 0 | 0 | 0 | 0 | 24 | CAVSSGTYKYIF | | | 12- | CASSLLGNTEAFF | 1858 |
| | | | | | | | | | | | 3,12- | | 2034 |
| | | | | | | | | | | | 4 | | |
| WB5 | Self_Naive | GP100_IMD | GP100_ | 0 | 0 | 0 | 3 | CAVRDDTGGFKT | 3- | CAGGPYN | 19 | CASSTTEAYEQYF | 1859 |
| | | | ITD | | | | | | Aug | TDKLIF | | | 1888 |
| | | | | | | | | IF | | | | | 2035 |
| WB6 | Self_Naive | GP100_IMD | GP100_ | 0 | 0 | 0 | 24 | CAFGDNYGQNFV | | | 19 | CASSTALAASYEQ | 1860 |
| | | | ITD | | | | | F | | | | YF | 2036 |
| WC4 | Self_Naive | MART1_A2L | 0 | 0 | 0 | 0 | | | | | 13 | CASSLGVGQPQH | 2037 |
| | | | | | | | | | | | | F | |
| WC5 | Self_Naive | GP100_IMD | GP100_ | 0 | 0 | 0 | 35 | CAGLADSNYQLI | | | 9 | CASSVGSGGRPS | 1861 |
| | | | ITD | | | | | W | | | | SYNEQFF | 2038 |
| WC6 | Self_Naive | ZNT8_LLS | 0 | 0 | 0 | 0 | 3- | CAMDSSYKLIF | 26-1 | CIVRVEC | 9 | CASSALAGGQAD | #NA |
| | | | | | | | Dec | | | MYSGGGA | | TQYF | |
| | | | | | | | | | | DGLTF | | | |
| WD4 | Self_Naive | MART1_A2L | 0 | 0 | 0 | 0 | 41 | CAVEGSRLTF | | | 2- | CASSSGPTMGGK | 1863 |
| | | | | | | | | | | | Nov | LFF | 2040 |
| WD5 | Self_Naive | MART1_A2L | 0 | 0 | 0 | 0 | 2- | CAVNPTGYSTLT | | | 2 | CASNSGGYNEQF | 1864 |
| | | | | | | | Dec | F | | | | F | 2041 |
| WD6 | Self_Naive | MART1_A2L | 0 | 0 | 0 | 0 | 2- | CALPKGGYSTLT | | | 5- | CASSTTGTGLLEQ | 1865 |
| | | | | | | | Dec | F | | | Jun | YF | 2042 |
| WE4 | Self_Naive | 0 | 0 | 0 | 0 | 0 | 17 | CALNFGNEKLTF | | | 27 | CASSSGPRGNEQ | 1866 |
| | | | | | | | | | | | | FF | 2043 |
| WE5 | Self_Naive | MART1_A2L | 0 | 0 | 0 | 0 | 2- | CAALTGNQFYF | | | 14 | CASSQGSGQPQH | 1867 |
| | | | | | | | Dec | | | | | F | 2044 |
| WE6 | Self_Naive | MART1_A2L | 0 | 0 | 0 | 0 | 1- | CVVNPFGNEKLT | | | 20-1 | CSARHPGVSTDT | 1868 |
| | | | | | | | Dec | F | | | | QYF | 2045 |
| WF4 | Self_Naive | PP1_SII | 0 | 0 | 0 | 0 | 27 | CAGVPSNTGKLIF | | | 1 | CASSPWRGPFQE | 1869 |
| | | | | | | | | | | | May- | TQYF | 2046 |
| WF5 | Self_Naive | DRIP_MLY | 0 | 0 | 0 | 0 | | | | | | | |
| WF6 | Self_Naive | SNPG_IML | 0 | 0 | 0 | 0 | | | | | 6- | CASSPGKTEAFF | 2047 |
| | | | | | | | | | | | May | | |
| WG4 | Self_Naive | SNPG_IML | 0 | 0 | 0 | 0 | | | | | 2- | CASSESGRAEAF | 2048 |
| | | | | | | | | | | | Oct | F | |
| WG5 | Self_Naive | MART1_A2L | 0 | 0 | 0 | 0 | 2- | CAASLGGGADGL | | | 9- | CASSPDVGHEKL | 1870 |
| | | | | | | | Dec | TF | | | Jul | FF | 2049 |
| WG6 | Self_Naive | MART1_A2L | 0 | 0 | 0 | 0 | 2- | CALAIGFGNVLHC | | | 27 | CASSPIGGGSNE | 1871 |
| | | | | | | | Dec | | | | | QFF | 2050 |
| WH4 | Self_Naive | GP100_IMD | GP100_ | 0 | 0 | 0 | 3 | CAVSFGSSNTGK | | | 5- | CASGFTFQGSPE | 1872 |
| | | | ITD | | | | | LIF | | | Dec | AFF | 2051 |
| WH5 | Self_Naive | MART1_A2L | 0 | 0 | 0 | 0 | | | | | | | |
| WH6 | Self_Naive | MART1_A2L | 0 | 0 | 0 | 0 | 2- | CAASGGGADGLT | | | 28 | CASSFGGLARNE | 1873 |
| | | | | | | | Dec | F | | | | QFF | 2052 |
| TA10 | Self_ | MART1_A2L | 0 | 0 | 0 | 0 | 14/DV4 | CAMREGTGRRAL | | | 6-2,6- | CASSYFGGSLSE | 1854 |
| | Nonnaive | | | | | | | TF | | | 3 | QYF | 2053 |
| TA11 | Self_ | MART1_A2L | 0 | 0 | 0 | 0 | 14/DV4 | CAMREGTGRRAL | | | 6-2,6- | CASSYFGGSLSE | 1854 |
| | Nonnaive | | | | | | | TF | | | 3 | QYF | 2053 |
| TA12 | Self_ | MART1_A2L | 0 | 0 | 0 | 0 | | | | | 6-2,6- | CASSYFGGSLSE | 2053 |
| | Nonnaive | | | | | | | | | | 3 | QYF | |
| TB10 | Self_ | MART1_A2L | 0 | 0 | 0 | 0 | 14/DV4 | CAMREGTGRRAL | | | 6-2,6- | CASSYFGGSLSE | 1854 |
| | Nonnaive | | | | | | | TF | | | 3 | QYF | 2053 |
| TB11 | Self_ | MART1_A2L | 0 | 0 | 0 | 0 | 14/DV4 | CAMREGTGRRAL | | | 6-2,6- | CASSYFGGSLSE | 1854 |
| | Nonnaive | | | | | | | TF | | | 3 | QYF | 2053 |
| TB12 | Self_ | 0 | 0 | 0 | 0 | 0 | 14/DV4 | CAMREGTGRRAL | | | 6-2,6- | CASSYFGGSLSE | 1854 |
| | Nonnaive | | | | | | | TF | | | 3 | QYF | 2053 |
| TC10 | Self_ | MART1_A2L | 0 | 0 | 0 | 0 | 14/DV4 | CAMREGTGRRAL | | | 6-2,6- | CASSYFGGSLSE | 1854 |
| | Nonnaive | | | | | | | TF | | | 3 | QYF | 2053 |
| TC11 | Self_ | CD1_LLG | 0 | 0 | 0 | 0 | | | | | 27 | CASSFLTGTGELF | 2054 |
| | Nonnaive | | | | | | | | | | | F | |
| TC12 | Self_ | MART1_A2L | ADI_SVA | 0 | 0 | 0 | 14/DV4 | CAMREGTGRRAL | | | 6-2,6- | CASSYFGGSLSE | 1854 |
| | Nonnaive | | | | | | | TF | | | 3 | QYF | 2053 |
| TD10 | Self_ | MART1_A2L | 0 | 0 | 0 | 0 | 14/DV4 | CAMREGTGRRAL | | | 6-2,6- | CASSYFGGSLSE | 1854 |
| | Nonnaive | | | | | | | TF | | | 3 | QYF | 2053 |
| TD11 | Self_ | MART1_A2L | ADI_SVA | 0 | 0 | 0 | 14/DV4 | CAMREGTGRRAL | | | 6-2,6- | CASSYFGGSLSE | 1854 |
| | Nonnaive | | | | | | | TF | | | 3 | QYF | 2053 |
| TD12 | Self_ | MART1_A2L | 0 | 0 | 0 | 0 | | | | | | | |
| | Nonnaive | | | | | | | | | | | | |
| TE10 | Self_ | DRIP_MLY | 0 | 0 | 0 | 0 | | | | | | | |
| | Nonnaive | | | | | | | | | | | | |
| TE11 | Self_ | MART1_A2L | 0 | 0 | 0 | 0 | 14/DV4 | CAMREGTGRRAL | | | 6-2,6- | CASSYFGGSLSE | 1854 |
| | Nonnaive | | | | | | | TF | | | 3 | QYF | 2053 |
| TE12 | Self_ | MART1_A2L | 0 | 0 | 0 | 0 | 14/DV4 | CAMREGTGRRAL | | | 6-2,6- | CASSYFGGSLSE | 1854 |
| | Nonnaive | | | | | | | TF | | | 3 | QYF | 2053 |
| TF10 | Self_ | MART1_A2L | 0 | 0 | 0 | 0 | 14/DV4 | CAMREGTGRRAL | | | 6-2,6- | CASSYFGGSLSE | 1854 |
| | Nonnaive | | | | | | | TF | | | 3 | QYF | 2053 |
| TF11 | Self_ | MART1_A2L | 0 | 0 | 0 | 0 | 14/DV4 | CAMREGTGRRAL | | | 6-2,6- | CASSYFGGSLSE | 1854 |
| | Nonnaive | | | | | | | TF | | | 3 | QYF | 2053 |
| TF12 | Self_ | MART1_A2L | 0 | 0 | 0 | 0 | 14/DV4 | CAMREGTGRRAL | | | 6-2,6- | CASSYFGGSLSE | 1854 |
| | Nonnaive | | | | | | | TF | | | 3 | QYF | 2053 |
| TG10 | Self_ | MART1_A2L | ADI_SVA | 0 | 0 | 0 | 14/DV4 | CAMREGTGRRAL | | | 6-2,6- | CASSYFGGSLSE | 1854 |
| | Nonnaive | | | | | | | TF | | | 3 | QYF | 2053 |
| TG11 | Self_ | MART1_A2L | 0 | 0 | 0 | 0 | 14/DV4 | CAMREGTGRRAL | | | | | 1854 |
| | Nonnaive | | | | | | | TF | | | | | |
| TG12 | Self_ | MART1_A2L | 0 | 0 | 0 | 0 | 2- | CAGNTGNQFYF | | | 28 | CASRPQGLGNTIY | 1874 |
| | Nonnaive | | | | | | Dec | | | | | F | 2055 |
| TH10 | Self_ | MART1_A2L | 0 | 0 | 0 | 0 | 14/DV4 | CAMREGTGRRAL | | | 6-2,6- | CASSYFGGSLSE | 1854 |
| | Nonnaive | | | | | | | TF | | | 3 | QYF | 2053 |
| TH11 | Self_ | MART1_A2L | 0 | 0 | 0 | 0 | 14/DV4 | CAMREGTGRRAL | | | 6-2,6- | CASSYFGGSLSE | 1854 |
| | Nonnaive | | | | | | | TF | | | 3 | QYF | 2053 |
| TH12 | Self_ | 0 | 0 | 0 | 0 | 0 | 14/DV4 | CAMREGTGRRAL | | | | | 1854 |
| | Nonnaive | | | | | | | TF | | | | | |
| UA10 | Self_ | MART1_A2L | 0 | 0 | 0 | 0 | 14/DV4 | CAMREGTGRRAL | | | 6-2,6- | CASSYFGGSLSE | 1854 |
| | Nonnaive | | | | | | | TF | | | 3 | QYF | 2053 |
| UA11 | Self_ | MART1_A2L | ADI_SVA | PP1_SII | 0 | 0 | 14/DV4 | CAMREGTGRRAL | | | 6-2,6- | CASSYFGGSLSE | 1854 |
| | Nonnaive | | | | | | | TF | | | 3 | QYF | 2053 |
| UA12 | Self_ | MART1_A2L | 0 | 0 | 0 | 0 | 14/DV4 | CAMREGTGRRAL | | | 6-2,6- | CASSYFGGSLSE | 1854 |
| | Nonnaive | | | | | | | TF | | | 3 | QYF | 2053 |
| UB10 | Self_ | 0 | 0 | 0 | 0 | 0 | 14/DV4 | CAMREGTGRRAL | | | 6-2,6- | CASSYFGGSLSE | 1854 |
| | Nonnaive | | | | | | | TF | | | 3 | QYF | 2053 |
| UB11 | Self_ | MART1_A2L | 0 | 0 | 0 | 0 | 14/DV4 | CAMREGTGRRAL | | | 6-2,6- | CASSYFGGSLSE | 1854 |
| | Nonnaive | | | | | | | TF | | | 3 | QYF | 2053 |
| UB12 | Self_ | MART1_A2L | 0 | 0 | 0 | 0 | 14/DV4 | CAMREGTGRRAL | | | 6-2,6- | CASSYFGGSLSE | 1854 |
| | Nonnaive | | | | | | | TF | | | 3 | QYF | 2053 |
| UC10 | Self_ | MART1_A2L | ADI_SVA | 0 | 0 | 0 | 14/DV4 | CAMREGTGRRAL | | | 6-2,6- | CASSYFGGSLSE | 1854 |
| | Nonnaive | | | | | | | TF | | | 3 | QYF | 2053 |
| UC11 | Self_ | 0 | 0 | 0 | 0 | 0 | 14/DV4 | CAMREGTGRRAL | | | 6-2,6- | CASSYFGGSLSE | 1854 |
| | Nonnaive | | | | | | | TF | | | 3 | QYF | 2053 |
| UC12 | Self_ | MART1_A2L | 0 | 0 | 0 | 0 | 14/DV4 | CAMREGTGRRAL | | | 6-2,6- | CASSYFGGSLSE | 1854 |
| | Nonnaive | | | | | | | TF | | | 3 | QYF | 2053 |
| UD10 | Self_ | 0 | 0 | 0 | 0 | 0 | 14/DV4 | CAMREGTGRRAL | | | 6-2,6- | CASSYFGGSLSE | 1854 |
| | Nonnaive | | | | | | | TF | | | 3 | QYF | 2053 |
| UD11 | Self_ | MART1_A2L | 0 | 0 | 0 | 0 | 14/DV4 | CAMREGTGRRAL | | | 6-2,6- | CASSYFGGSLSE | 1854 |
| | Nonnaive | | | | | | | TF | | | 3 | QYF | 2053 |
| UD12 | Self_ | MART1_A2L | 0 | 0 | 0 | 0 | 14/DV4 | CAMREGTGRRAL | | | 6-2,6- | CASSYFRGSLSE | 1854 |
| | Nonnaive | | | | | | | TF | | | 3 | QYF | 2053 |
| UE10 | Self_ | MART1_A2L | ADI_SVA | 0 | 0 | 0 | 14/DV4 | CAMREGTGRRAL | | | 6-2,6- | CASSYFGGSLSE | 1854 |
| | Nonnaive | | | | | | | TF | | | 3 | QYF | 2053 |
| UE11 | Self_ | MART1_A2L | 0 | 0 | 0 | 0 | 14/DV4 | CAMREGTGRRAL | | | 6-2,6- | CASSYFGGSLSE | 1854 |
| | Nonnaive | | | | | | | TF | | | 3 | QYF | 2053 |
| UE12 | Self_ | MART1_ | 0 | 0 | 0 | 0 | 14/DV4 | CAMREGTGRRAL | | | 6-2,6- | CASSYFGGSLSE | 1854 |
| | Nonnaive | A2L | | | | | | TF | | | 3 | QYF | 2053 |
| UF10 | Self_ | MART1_A2L | ADI_SVA | 0 | 0 | 0 | | | | | 6-2,6- | CASSYFGGSLSE | 2053 |
| | Nonnaive | | | | | | | | | | 3 | QYF | |
| UF11 | Self_ | MART1_A2L | 0 | 0 | 0 | 0 | 14/DV4 | CAMREGTGRRAL | | | 6-2,6- | CASSYFGGSLSE | 1854 |
| | Nonnaive | | | | | | | TF | | | 3 | QYF | 2053 |
| UF12 | Self_ | MART1_A2L | ADI_SVA | 0 | 0 | 0 | 14/DV4 | CAMREGTGRRAL | | | 6-2,6- | CASSYFGGSLSE | 1854 |
| | Nonnaive | | | | | | | TF | | | 3 | QYF | 2053 |
| UG10 | Self_ | MART1_A2L | 0 | 0 | 0 | 0 | 14/DV4 | CAMREGTGRRAL | | | 6-2,6- | CASSYFGGSLSE | 1854 |
| | Nonnaive | | | | | | | TF | | | 3 | QYF | 2053 |
| UG11 | Self_ | 0 | 0 | 0 | 0 | 0 | 14/DV4 | CAMREGTGRRAL | | | 6-2,6- | CASSYFGGSLSE | 1854 |
| | Nonnaive | | | | | | | TF | | | 3 | QYF | 2053 |
| UG12 | Self_ | MART1_A2L | 0 | 0 | 0 | 0 | 14/DV4 | CAMREGTGRRAL | | | 6-2,6- | CASSYFGGSLSE | 1854 |
| | Nonnaive | | | | | | | TF | | | 3 | QYF | 2053 |
| UH10 | Self_ | MART1_A2L | 0 | 0 | 0 | 0 | 14/DV4 | CAMREGTGRRAL | | | 6-2,6- | CASSYFGGSLSE | 1854 |
| | Nonnaive | | | | | | | TF | | | 3 | QYF | 2053 |
| UH11 | Self_ | MART1_A2L | 0 | 0 | 0 | 0 | 14/DV4 | CAMREGTGRRAL | | | 6-2,6- | CASSYFGGSLSE | 1854 |
| | Nonnaive | | | | | | | TF | | | 3 | QYF | 2053 |
| UH12 | Self_ | 0 | 0 | 0 | 0 | 0 | 14/DV4 | CAMREGTGRRAL | | | 6-2,6- | CASSYFGGSLSE | 1854 |
| | Nonnaive | | | | | | | TF | | | 3 | QYF | 2053 |
| VA10 | Self_ | MART1_A2L | ADI_SVA | 0 | 0 | 0 | 14/DV4 | CAMREGTGRRAL | | | 6-2,6- | CASSYFGGSLSE | 1854 |
| | Nonnaive | | | | | | | TF | | | 3 | QYF | 2053 |
| VA11 | Self_ | MART1_A2L | ADI_SVA | 0 | 0 | 0 | 14/DV4 | CAMREGTGRRAL | | | 6-2,6- | CASSYFGGSLSE | 1854 |
| | Nonnaive | | | | | | | TF | | | 3 | QYF | 2053 |
| VA12 | Self_ | MART1_A2L | 0 | 0 | 0 | 0 | 14/DV4 | CAMREGTGRRAL | | | 6-2,6- | CASSYFGGSLSE | 1854 |
| | Nonnaive | | | | | | | TF | | | 3 | QYF | 2053 |
| VB10 | Self_ | MART1_A2L | ADI_SVA | 0 | 0 | 0 | 14/DV4 | CAMREGTGRRAL | | | 6-2,6- | CASSYFGGSLSE | 1854 |
| | Nonnaive | | | | | | | TF | | | 3 | QYF | 2053 |
| VB11 | Self_ | MART1_A2L | 0 | 0 | 0 | 0 | 14/DV4 | CAMREGTGRRAL | | | 6-2,6- | CASSYFGGSLSE | 1854 |
| | Nonnaive | | | | | | | TF | | | 3 | QYF | 2053 |
| VB12 | Self_ | MART1_A2L | 0 | 0 | 0 | 0 | 14/DV4 | CAMREGTGRRAL | | | 6-2,6- | CASSYFGGSLSE | 1854 |
| | Nonnaive | | | | | | | TF | | | 3 | QYF | 2053 |
| VC10 | Self_ | MART1_A2L | ADI_SVA | 0 | 0 | 0 | 14/DV4 | CAMREGTGRRAL | | | 6-2,6- | CASSYFGGSLSE | 1854 |
| | Nonnaive | | | | | | | TF | | | 3 | QYF | 2053 |
| VC11 | Self_ | 0 | 0 | 0 | 0 | 0 | 14/DV4 | CAMREGTGRRAL | | | 6-2,6- | CASSYFGGSLSE | 1854 |
| | Nonnaive | | | | | | | TF | | | 3 | QYF | 2053 |
| VC12 | Self_ | MART1_A2L | 0 | 0 | 0 | 0 | 14/DV4 | CAMREGTGRRAL | | | 6-2,6- | CASSYFGGSLSE | 1854 |
| | Nonnaive | | | | | | | TF | | | 3 | QYF | 2053 |
| VD10 | Self_ | MART1_A2L | 0 | 0 | 0 | 0 | 2- | FAGGGGSSNTG | | | 9 | CASSPGGTEAFF | 1854 |
| | Nonnaive | | | | | | Dec | KLIF | | | | | 2057 |
| VD11 | Self_ | 0 | 0 | 0 | 0 | 0 | 14/DV4 | CAMREGTGRRAL | | | 6-2,6- | CASSYFGGSLSE | 1854 |
| | Nonnaive | | | | | | | TF | | | 3 | QYF | 2053 |
| VD12 | Self_ | 0 | 0 | 0 | 0 | 0 | 14/DV4 | CAMREGTGRRAL | | | 6-2,6- | CASSYFGGSLSE | 1854 |
| | Nonnaive | | | | | | | TF | | | 3 | QYF | 2053 |
| VE10 | Self_ | MART1_A2L | 0 | 0 | 0 | 0 | 14/DV4 | CAMREGTGRRAL | | | 6-2,6- | CASSYFGGSLSE | 1854 |
| | Nonnaive | | | | | | | TF | | | 3 | QYF | 2053 |
| VE11 | Self_ | MART1_A2L | ADI_SVA | 0 | 0 | 0 | 14/DV4 | CAMREGTGRRAL | | | 6-2,6- | CASSYFGGSLSE | 1854 |
| | Nonnaive | | | | | | | TF | | | 3 | QYF | 2053 |
| VE12 | Self_ | MART1_A2L | 0 | 0 | 0 | 0 | 14/DV4 | CAMREGTGRRAL | | | 6-2,6- | CASSYFGGSLSE | 1854 |
| | Nonnaive | | | | | | | TF | | | 3 | QYF | 2053 |
| VF10 | Self_ | MART1_A2L | ADI_SVA | 0 | 0 | 0 | 14/DV4 | CAMREGTGRRAL | | | 6-2,6- | CASSYFGGSLSE | 1854 |
| | Nonnaive | | | | | | | TF | | | 3 | QYF | 2053 |
| VF11 | Self_ | MART1_A2L | 0 | 0 | 0 | 0 | 14/DV4 | CAMREGTGRRAL | | | 6-2,6- | CASSYFGGSLSE | 1854 |
| | Nonnaive | | | | | | | TF | | | 3 | QYF | 2053 |
| VF12 | Self_ | MART1_A2L | 0 | 0 | 0 | 0 | 14/DV4 | CAMREGTGRRAL | | | 6-2,6- | CASSYFGGSLSE | 1854 |
| | Nonnaive | | | | | | | TF | | | 3 | QYF | 2053 |
| VG10 | Self_ | 0 | 0 | 0 | 0 | 0 | 14/DV4 | CAMREGTGRRAL | | | 6-2,6- | CASSYFGGSLSE | 1854 |
| | Nonnaive | | | | | | | TF | | | 3 | QYF | 2053 |
| VG11 | Self_ | MART1_A2L | 0 | 0 | 0 | 0 | 2- | CAVTGQGGKLIF | | | 5- | CASSFGGGGQPQ | 1876 |
| | Nonnaive | | | | | | Dec | | | | Jun | HF | 2058 |
| VG12 | Self_ | MART1_A2L | ADI_SVA | 0 | 0 | 0 | 14/DV4 | CAMREGTGRRAL | | | 6-2,6- | CASSYFGGSLSE | 1854 |
| | Nonnaive | | | | | | | TF | | | 3 | QYF | 2053 |
| VH10 | Self_ | MART1_A2L | 0 | 0 | 0 | 0 | | | | | 6-2,6- | CASSYFGGSLSE | 2053 |
| | Nonnaive | | | | | | | | | | 3 | QYF | |
| VH11 | Self_ | DRIP_MLY | 0 | 0 | 0 | 0 | | | | | | | |
| | Nonnaive | | | | | | | | | | | | |
| VH12 | Self_ | MART1_A2L | 0 | 0 | 0 | 0 | 2- | CAVGLGFGNVLH | | | 1- | CASSLGVGTEAFF | 1877 |
| | Nonnaive | | | | | | Dec | C | | | Apr | | 2059 |
| WA10 | Self_ | MART1_A2L | 0 | 0 | 0 | 0 | 14/DV4 | CAMREGTGRRAL | | | 6-2,6- | CASSYFGGSLSE | 1854 |
| | Nonnaive | | | | | | | TF | | | 3 | QYF | 2053 |
| WA9 | Self_ | MART1_A2L | ADI_SVA | 0 | 0 | 0 | 14/DV4 | CAMREGTGRRAL | | | 6-2,6- | CASSYFGGSLSE | 1854 |
| | Nonnaive | | | | | | | TF | | | 3 | QYF | 2053 |
| WB10 | Self_ | MART1_A2L | ADI_SVA | 0 | 0 | 0 | 14/DV4 | CAMREGTGRRAL | | | 6-2,6- | CASSYFGGSLSE | 1854 |
| | Nonnaive | | | | | | | TF | | | 3 | QYF | 2053 |
| WB9 | Self_ | MART1_A2L | 0 | 0 | 0 | 0 | 14/DV4 | CAMREGTGRRAL | | | 6-2,6- | CASSYFGGSLSE | 1854 |
| | Nonnaive | | | | | | | TF | | | 3 | QYF | 2053 |
| WC10 | Self_ | MART1_A2L | 0 | 0 | 0 | 0 | 14/DV4 | CAMREGTGRRAL | | | 6-2,6- | CASSYFGGSLSE | 1854 |
| | Nonnaive | | | | | | | TF | | | 3 | QYF | 2053 |
| WC9 | Self_ | MART1_A2L | 0 | 0 | 0 | 0 | 14/DV4 | CAMREGTGRRAL | | | 6-2,6- | CASSYFGGSLSE | 1854 |
| | Nonnaive | | | | | | | TF | | | 3 | QYF | 2053 |
| WD10 | Self_ | MART1_A2L | 0 | 0 | 0 | 0 | 14/DV4 | CAMREGTGRRAL | | | 6-2,6- | CASSYFGGSLSE | 1854 |
| | Nonnaive | | | | | | | TF | | | 3 | QYF | 2053 |
| WD9 | Self_ | MART1_A2L | ADI_SVA | 0 | 0 | 0 | 14/DV4 | CAMREGTGRRAL | | | 6-2,6- | CASSYFGGSLSE | 1854 |
| | Nonnaive | | | | | | | TF | | | 3 | QYF | 2053 |
| WE10 | Self_ | MART1_A2L | 0 | 0 | 0 | 0 | 14/DV4 | CAMREGTGRRAL | | | 6-2,6- | CASSYFGGSLSE | 1854 |
| | Nonnaive | | | | | | | TF | | | 3 | QYF | 2053 |
| WE9 | Self_ | 0 | 0 | 0 | 0 | 0 | 14/DV4 | CAMREGTGRRAL | | | 6-2,6- | CASSYFGGSLSE | 1854 |
| | Nonnaive | | | | | | | TF | | | 3 | QYF | 2053 |
| WF10 | Self_ | MART1_A2L | ADI_SVA | 0 | 0 | 0 | 14/DV4 | CAMREGTGRRAL | | | 6-2,6- | CASSYFGGSLSE | 1854 |
| | Nonnaive | | | | | | | TF | | | 3 | QYF | 2053 |
| WF9 | Self_ | MART1_A2L | 0 | 0 | 0 | 0 | 14/DV4 | CAMREGTGRRAL | | | 6-2,6- | CASSYFGGSLSE | 1854 |
| | Nonnaive | | | | | | | TF | | | 3 | QYF | 2053 |
| WG10 | Self_ | DRIP_MLY | 0 | 0 | 0 | 0 | | | | | 12- | CASSFGRNRSQN | 2060 |
| | Nonnaive | | | | | | | | | | 3,12- | TEAFF | |
| | | | | | | | | | | | 4 | | |
| WG9 | Self_ | MART1_A2L | 0 | 0 | 0 | 0 | 14/DV4 | CAMREGTGRRAL | | | 6-2,6- | CASSYFGGSLSE | 1854 |
| | Nonnaive | | | | | | | TF | | | 3 | QYF | 2053 |
| WH10 | Self_ | 0 | 0 | 0 | 0 | 0 | 14/DV4 | CAMREGPGGTS | | | 6-2,6- | CASSYRQDSNQP | 1878 |
| | Nonnaive | | | | | | | YGKLTF | | | 3 | QHF | 2061 |
| WH9 | Self_ | MART1_A2L | 0 | 0 | 0 | 0 | | | | | 6-2,6- | CASSYFGGSLSE | 2053 |
| | Nonnaive | | | | | | | | | | 3 | QYF | |

TABLE 5
Description of neoantigen and wildtype peptides used for experiment 3 and 4.

| | | Position | | | Wildtype HLA- | | | Mutant HLA- |
|---|---|---|---|---|---|---|---|---|
| Wildtype | Mutant | of | | SEQ | A2 Binding | | SEQ | A2 Binding |
| amino | amino | mutation | Wildtype | ID | NetMHC | Mutant | ID | NetMHC 4.0 |
| acid | acid | in peptide | peptide | NO | 4.0 (nM) | peptide | NO | (nM) |
| T | I | 3 | FLTYLDVSV | 2062 | 6.4 | FLIYLDVSV | 2082 | 4 |
| S | F | 1 | SMPDFDLHL | 2063 | 22.9 | FMPDFDLHL | 2083 | 5.5 |
| S | F | 8 | VLLGVKLSGV | 2064 | 32.5 | VLLGVKLFGV | 2084 | 9.1 |
| H | Y | 8 | ALIHHNTHL | 2065 | 79.3 | ALIHHNTYL | 2085 | 17.9 |
| L | F | 8 | VLENFTILLV | 2066 | 138.5 | VLENFTIFLV | 2086 | 50.6 |
| L | F | 9 | SVLENFTILL | 2067 | 182.7 | SVLENFTIFL | 2087 | 84.7 |
| A | V | 9 | ILTGLNYEA | 2068 | 41.7 | ILTGLNYEV | 2088 | 7.4 |
| S | F | 5 | ALYGSVPVL | 2069 | 15.3 | ALYGFVPVL | 2089 | 8.3 |
| L | M | 3 | VVLSWAPPV | 2070 | 9.6 | VVMSWAPPV | 2090 | 5.8 |
| L | P | 6 | ALLETLSLLL | 2071 | 35.7 | ALLETPSLLL | 2091 | 53.5 |
| L | H | 8 | ALSPVIPLI | 2072 | 8.1 | ALSPVIPHI | 2092 | 11.3 |
| H | Y | 8 | KLFEFLVHGV | 2073 | 4.4 | KLFEFLVYGV | 2093 | 3.3 |
| R | C | 4 | NLNRCSVPV | 2074 | 48.4 | NLNCCSVPV | 2094 | 18.2 |
| C | F | 5 | LIIPCIHLI | 2075 | 32.7 | LIIPFIHLI | 2095 | 24.5 |
| T | P | 6 | LLFGMTPCL | 2076 | 7.4 | LLFGMPPCL | 2096 | 11.7 |
| P | L | 6 | KLSHQPVLL | 2077 | 85.1 | KLSHQLVLL | 2097 | 25.8 |
| H | Y | 5 | AVGSHVYSV | 2078 | 91.5 | AVGSYVYSV | 2098 | 29.3 |
| P | L | 5 | FLYNPLTRV | 2079 | 4.4 | FLYNLLTRV | 2099 | 3.3 |
| Q | K | 8 | KLMNIQQQL | 2080 | 15.4 | KLMNIQQKL | 2100 | 20.3 |
| R | Q | 5 | MLGERLFPL | 2081 | 4 | MLGEQLFPL | 2101 | 3.4 |

TABLE 6
TetTCR-Seq summary for experiment 3.

| | | | | | | | | | | | | | SEQ ID |
|---|---|---|---|---|---|---|---|---|---|---|---|---|---|
| Cell | Sorted | Detected Peptide by MID Count | | | | | TCRα,1 | | TCRα,2 | | TCRβ | | NO |
| Name | Population | Rank 1 | Rank 2 | Rank 3 | Rank 4 | Rank 5 | TRAV | CDR3α | TRAV | CDR3α | TRBV | CDR3β | (L to R) |
| BA1 | Neo⁺WT⁺ | GANAB | GANAB- | 0 | 0 | 0 | | | | | 29-1*01 | CSVPEGNTGELF | 2312 |
| | | | S5F | | | | | | | | | F | |
| BA10 | Neo⁺WT⁺ | HCV-KLV | 0 | 0 | 0 | 0 | | | | | 7-9*01 | CASSLEGEQYF | 2313 |
| BA11 | Neo⁺WT⁺ | NSDHL- | NSDHL | 0 | 0 | 0 | 14/DV4*01 | CAMRESNTGGFK | | | | | 2102 |
| | | A9V | | | | | | TIF | | | | | |
| BA2 | Neo⁺WT⁺ | SMARCD3 | SMARCD3- | 0 | 0 | 0 | 5*01 | CAVYNTDKLIF | | | 4-1*01 | CASSQGALGYTF | 2103 |
| | | | H8Y | | | | | | | | | | 2314 |
| BA3 | Neo⁺WT⁺ | USP28 | 0 | 0 | 0 | 0 | 13- | GGTSYGKLTF | | | 12- | CASSFPDRGQGV | 2104 |
| | | | | | | | 2*01/13- | | | | 3*01,12- | YGYTF | 2315 |
| | | | | | | | 2*02 | | | | 4*01 | | |
| BA6 | Neo⁺WT⁺ | FNDC3B- | FNDC3B | 0 | 0 | 0 | 12-2*01 | CAVNGQAGTALIF | | | 25-1*01 | CASYFFALFTDTQ | 2105 |
| | | L3M | | | | | | | | | | YF | 2316 |
| BA8 | Neo⁺WT⁺ | NSDHL | NSDHL- | 0 | 0 | 0 | | | | | 20-1*01 | CSARLKGGGDTQ | 2317 |
| | | | A9V | | | | | | | | | YF | |
| BA9 | Neo⁺WT⁺ | HCV-KLV | 0 | 0 | 0 | 0 | 38- | CAYTHARLMF | 21*01 | RINSGGSNYKL | 15*01 | CATSRDRGTDTF | 2106 |
| | | | | | | | 2/DV8*01 | | | TF | | F | 2289 |
| | | | | | | | | | | | | | 2318 |
| BB1 | Neo⁺WT⁺ | FNDC3B | FNDC3B- | 0 | 0 | 0 | 12-2*01 | CAGIPDAGGTSYG | | | 6-2*01,6- | CASSYSSDFWGD | 2107 |
| | | | L3M | | | | | KLTF | | | 3*01 | QPQHF | 2319 |
| BB10 | Neo⁺WT⁺ | MLL2 | MLL2-L8H | 0 | 0 | 0 | 12-2*01 | CAVNKPGFGNEKL | | | 27*01 | CASSGAAGTSAY | 2108 |
| | | | | | | | | TF | | | | NEQFF | 2320 |
| BB11 | Neo⁺WT⁺ | SEC24A- | SEC24A | 0 | 0 | 0 | 25*01 | CAGRKTSYDKVIF | | | 4-3*01 | CASSYASTGTLN | 2109 |
| | | PSL | | | | | | | | | | YGYTF | 2321 |
| BB12 | Neo⁺WT⁺ | FNDC3B- | FNDC3B | 0 | 0 | 0 | 8-3*01 | CAVGATNNAGNM | | | 7-9*01 | CASSPDLNPYEQ | 2110 |
| | | L3M | | | | | | LTF | | | | YF | 2322 |
| BB6 | Neo⁺WT⁺ | HCV-KLV | 0 | 0 | 0 | 0 | | | | | 13*01 | CASSSQGETYEQ | 2323 |
| | | | | | | | | | | | | YF | |
| BB7 | Neo⁺WT⁺ | HCV-KLV | 0 | 0 | 0 | 0 | 38- | CAYWEGAQKLVF | | | 15*01 | CATAKEGLAYEQ | 2111 |
| | | | | | | | 2/DV8*01 | | | | | FF | 2324 |
| BB8 | Neo⁺WT⁺ | FNDC3B | FNDC3B- | 0 | 0 | 0 | 8-1*01 | CAVNVYNQGGKLI | | | 13*01 | CASSSGLAGGPK | 2112 |
| | | | L3M | | | | | F | | | | HYEQYF | 2325 |
| BC1 | Neo⁺WT⁺ | NSDHL- | NSDHL | 0 | 0 | 0 | 14/DV4*01 | CAMSVSDTGNQF | | | 15*01 | CATSRDRGLTEA | 2113 |
| | | A9V | | | | | | YF | | | | FF | 2326 |
| BC10 | Neo⁺WT⁺ | FNDC3B | FNDC3B- | 0 | 0 | 0 | 8-3*01 | CAVGAGSNFGNE | | | 6-5*01 | CASSYGGNSPLH | 2114 |
| | | | L3M | | | | | KLTF | | | | F | 2327 |
| BC11 | Neo⁺WT⁺ | AKAP13 | AKAP13- | 0 | 0 | 0 | | | | | 29-1*01 | CSADVGGQNEQ | 2328 |
| | | | Q8K | | | | | | | | | YF | |
| BC12 | Neo⁺WT⁺ | WDR46 | WDR46- | 0 | 0 | 0 | 21*01 | CAVRNRDDKIIF | | | 9*01 | CASSVGTGYEQY | 2115 |
| | | | T3I | | | | | | | | | F | 2329 |
| BC2 | Neo⁺WT⁺ | 0 | 0 | 0 | 0 | 0 | | | | | 12- | CASSLSSRSNQP | 2330 |
| | | | | | | | | | | | 3*01,12- | QHF | |
| | | | | | | | | | | | 4*01 | | |
| BC4 | Neo⁺WT⁺ | FNDC3B | 0 | 0 | 0 | 0 | 19*01 | CALSEVGAGSYQL | | | | | 2116 |
| | | | | | | | | TF | | | | | |
| BC5 | Neo⁺WT⁺ | FNDC3B | FNDC3B- | 0 | 0 | 0 | 3*01 | CAVQAGGYQKVT | | | 13*01 | CASSSRQGAGDT | 2117 |
| | | | L3M | | | | | F | | | | QYF | 2331 |
| BC8 | Neo⁺WT⁺ | NSDHL- | NSDHL | EMPTY | 0 | 0 | 14/DV4*01 | CAMREGNTGGFK | | | 9*01 | CASSAGGDTEAF | 2118 |
| | | A9V | | | | | | TIF | | | | F | 2332 |
| BC9 | Neo⁺WT⁺ | HCV-KLV | 0 | 0 | 0 | 0 | 38- | CAYGANDMRF | | | 25-1*01 | CASSDGGKDGYT | 2119 |
| | | | | | | | 2/DV8*01 | | | | | F | 2333 |
| BD1 | Neo⁺WT⁺ | FNDC3B | FNDC3B- | 0 | 0 | 0 | | | | | 28*01 | CASSLWRGMGA | 2334 |
| | | | L3M | | | | | | | | | GELFF | |
| BD10 | Neo⁺WT⁺ | FNDC3B | FNDC3B- | 0 | 0 | 0 | 29/DV5*01 | CAASATGGTSYGK | | | 19*01 | CASSFTSGSGHE | 2120 |
| | | | L3M | | | | | LTF | | | | QYF | 2335 |
| BD11 | Neo⁺WT⁺ | ERBB2 | ERBB2- | 0 | 0 | 0 | 14/DV4*01 | CAMHRDDKIIF | | | 12- | CASSLAVQRPSG | 2121 |
| | | | H8Y | | | | | | | | 3*01,12- | NTIYF | 2336 |
| | | | | | | | | | | | 4*01 | | |
| BD12 | Neo⁺WT⁺ | NSDHL | NSDHL- | 0 | 0 | 0 | 38- | CASGIQGAQKLVF | | | 7-9*01 | CASSLSGVAYGY | 2122 |
| | | | A9V | | | | 2/DV8*01 | | | | | TF | 2337 |
| BD2 | Neo⁺WT⁺ | 0 | 0 | 0 | 0 | 0 | 24*01 | CALSGYSTLTF | | | 2*01 | CASSQGQGSSQ | 2123 |
| | | | | | | | | | | | | YF | 2338 |
| BD3 | Neo⁺WT⁺ | FNDC3B | FNDC3B- | 0 | 0 | 0 | 12-2*01 | CAVSKEGSYIPTF | | | 29-1*01 | CSVRGGGDNSPL | 2124 |
| | | | L3M | | | | | | | | | HF | 2339 |
| BD5 | Neo⁺WT⁺ | NSDHL- | NSDHL | 0 | 0 | 0 | 38-1*01 | CAFMIDNNNDMRF | | | 9*01 | CASSGLAGGPFG | 2125 |
| | | A9V | | | | | | | | | | METQYF | 2340 |
| BD8 | Neo⁺WT⁺ | SMARCD3 | 0 | 0 | 0 | 0 | 8-1*01 | CAVNAWNNDMRF | | | 27*01 | CASTQGGVDTQY | 2126 |
| | | | | | | | | | | | | F | 2341 |
| BE1 | Neo⁺WT⁺ | FNDC3B | FNDC3B- | 0 | 0 | 0 | 8-3*01 | CAVGGEAQGAQK | | | 7-7*01 | CASSWGPGYEQ | 2127 |
| | | | L3M | | | | | LVF | | | | YF | 2342 |
| BE10 | Neo⁺WT⁺ | HCV-KLV | 0 | 0 | 0 | 0 | 38-1*01 | CAVSGAGSYQLTF | | | 7-9*01 | CASSLVDSGLYE | 2128 |
| | | | | | | | | | | | | QYF | 2343 |
| BE12 | Neo⁺WT⁺ | FNDC3B | FNDC3B- | 0 | 0 | 0 | 19*01 | CALSEAMTSGTYK | | | 20-1*01 | CSAREVRDLYNE | 2129 |
| | | | L3M | | | | | YIF | | | | QFF | 2344 |
| BE3 | Neo⁺WT⁺ | FNDC3B | FNDC3B- | 0 | 0 | 0 | 3*01 | CAVSNLMDTGRR | | | 5-8*01 | CASSLSSGPYNE | 2130 |
| | | | L3M | | | | | ALTF | | | | QFF | 2345 |
| BE5 | Neo⁺WT⁺ | NSDHL | NSDHL- | 0 | 0 | 0 | 9-2*01 | CALSEHDMRF | | | 7-9*01 | CASSLPGGPRET | 2131 |
| | | | A9V | | | | | | | | | QYF | 2346 |
| BE9 | Neo⁺WT⁺ | FNDC3B | FNDC3B- | 0 | 0 | 0 | 17*01 | CATDADTGNQFYF | | | 12- | CASSFGPYGYTF | 2132 |
| | | | L3M | | | | | | | | 3*01,12- | | 2347 |
| | | | | | | | | | | | 4*01 | | |
| BF11 | Neo⁺WT⁺ | NSDHL- | NSDHL | 0 | 0 | 0 | 38- | CALNTGTASKLTF | | | 7-8*01 | CASSLQASGRET | 2133 |
| | | A9V | | | | | 2/DV8*01 | | | | | QYF | 2348 |
| BF12 | Neo⁺WT⁺ | HCV-KLV | EMPTY | 0 | 0 | 0 | 38- | CAYYGGGATNKLI | | | 13*01 | CASSLGSGTQYF | 2134 |
| | | | | | | | 2/DV8*01 | F | | | | | 2349 |
| BF3 | Neo⁺WT⁺ | FNDC3B | FNDC3B- | 0 | 0 | 0 | 14/DV4*01 | CAMSLRSYTGNQF | | | 20-1*01 | CSARISTSSSYEQ | 2135 |
| | | | L3M | | | | | YF | | | | YF | 2350 |
| BF5 | Neo⁺WT⁺ | FNDC3B | FNDC3B- | 0 | 0 | 0 | 29/DV5*01 | CAAKDNYGQNFVF | | | 5-5*01 | CASSLYGGESQE | 2136 |
| | | | L3M | | | | | | | | | TQYF | 2351 |
| BF9 | Neo⁺WT⁺ | FNDC3B- | FNDC3B | 0 | 0 | 0 | | | | | | | |
| | | L3M | | | | | | | | | | | |
| BG1 | Neo⁺WT⁺ | MRM1 | MRM1- | 0 | 0 | 0 | 29/DV5*01 | CAASLRYFGNEKL | 13- | CAVVMEYGNKL | 12- | CASSPDPYEQYF | 2137 |
| | | | T6P | | | | | TF | 2*01 | VF | 3*01,12- | | 2290 |
| | | | | | | | | | | | 4*01 | | 2352 |
| BG10 | Neo⁺WT⁺ | PGM5 | PGM5- | 0 | 0 | 0 | 41*01 | CAVTDYNTDKLIF | | | 28*01 | CASSFRGEAFF | 2138 |
| | | | H5Y | | | | | | | | | | 2353 |
| BG11 | Neo⁺WT⁺ | HCV-KLV | 0 | 0 | 0 | 0 | 38- | CAYVEGNYQLIW | | | 19*01 | CASSIAAGNTIYF | 2139 |
| | | | | | | | 2/DV8*01 | | | | | | 2354 |
| BG12 | Neo⁺WT⁺ | 0 | 0 | 0 | 0 | 0 | 19*01 | CALSEVRYSSASKI | | | 27*01 | CASSLHREVNEK | 2140 |
| | | | | | | | | IF | | | | LFF | 2355 |
| BG2 | Neo⁺WT⁺ | FNDC3B | FNDC3B- | 0 | 0 | 0 | 19*01 | CALRGRVAGANNL | | | 6-1*01 | CASSEWAGQPQ | 2141 |
| | | | L3M | | | | | FF | | | | HF | 2356 |
| BG5 | Neo⁺WT⁺ | NSDHL | NSDHL- | 0 | 0 | 0 | 8-3*01 | CAVAFNNAGNMLT | | | 5-4*01 | CASSGGGAEAFF | 2142 |
| | | | A9V | | | | | F | | | | | 2357 |
| BG7 | Neo⁺WT⁺ | ERBB2 | ERBB2- | 0 | 0 | 0 | 10*01 | CVVSGVNVWGTY | | | 19*01 | CASSIESGSKQR | 2143 |
| | | | H8Y | | | | | KYIF | | | | NEQFF | 2358 |
| BG9 | Neo⁺WT⁺ | 0 | 0 | 0 | 0 | 0 | | | | | 10-3*01 | CATREPPNTEAF | 2359 |
| | | | | | | | | | | | | F | |
| BH1 | Neo⁺WT⁺ | AKAP13 | AKAP13- | 0 | 0 | 0 | 24*01 | CAFPMDSNYQLIW | | | 6-6*01 | CASSYNSMNTEA | 2144 |
| | | | Q8K | | | | | | | | | FF | 2360 |
| BH10 | Neo⁺WT⁺ | FNDC3B | FNDC3B- | 0 | 0 | 0 | 12-2*01 | CAPGGEKLTF | | | 7-6*01 | CASSLGGPAEQY | 2145 |
| | | | L3M | | | | | | | | | F | 2361 |
| BH11 | Neo⁺WT⁺ | HCV-KLV | 0 | 0 | 0 | 0 | 38-2/ | CSVGGGSEKLVF | | | 7-9*01 | CASSFGGYEQYF | 2146 |
| | | | | | | | DV8*01 | | | | | | 2362 |
| BH2 | Neo⁺WT⁺ | FNDC3B- | FNDC3B | 0 | 0 | 0 | | | | | 28*01 | CASSSSGIGETQ | 2363 |
| | | L3M | | | | | | | | | | YF | |
| BH5 | Neo⁺WT⁺ | MLL2 | MLL2-L8H | 0 | 0 | 0 | 12-2*01 | CAGLNSDGQKLLF | | | 6-2*01,6- | CASSYSSDRSSY | 2147 |
| | | | | | | | | | | | 3*01 | EQYF | 2364 |
| BH6 | Neo⁺WT⁺ | MLL2-L8H | GANAB | 0 | 0 | 0 | 12-2*01 | CAVNSKSGYSTLT | | | 6-2*01,6- | CASKSWDMAYE | 2148 |
| | | | | | | | | F | | | 3*01 | QYF | 2365 |
| BH7 | Neo⁺WT⁺ | HCV-KLV | 0 | 0 | 0 | 0 | 12-2*01 | CAVSMDTGRRALT | | | 28*01 | CASSSGTSLTLTY | 2149 |
| | | | | | | | | F | | | | NEQFF | 2366 |
| BH8 | Neo⁺WT⁺ | FNDC3B | FNDC3B- | 0 | 0 | 0 | 14/DV4*01 | CAMREGGNDMRF | | | 4-2*01 | CASSPRIGGPRE | 2150 |
| | | | L3M | | | | | | | | | GYTF | 2367 |
| BH9 | Neo⁺WT⁺ | FNDC3B- | FNDC3B | 0 | 0 | 0 | 3*01 | CAVRDKNRDDKIIF | | | 7-9*01 | CASQPWFNTGEL | 2151 |
| | | L3M | | | | | | | | | | FF | 2368 |
| CA5 | Neo⁺WT⁺ | NSDHL- | NSDHL | 0 | 0 | 0 | 5*01 | CAEKGAGGSYIPT | | | 10-3*01 | CAISPGGEQFF | 2152 |
| | | A9V | | | | | | F | | | | | 2369 |
| CA6 | Neo⁺WT⁺ | NSDHL | NSDHL- | 0 | 0 | 0 | 14/DV4*01 | CAMREVREAGNQ | | | 6-6*01 | CASSYSLAGEFF | 2153 |
| | | | A9V | | | | | FYF | | | | | 2370 |
| CB4 | Neo⁺WT⁺ | AKAP13 | AKAP13- | 0 | 0 | 0 | | | | | 3-1*01 | CASGKGDTEAFF | 2371 |
| | | | Q8K | | | | | | | | | | |
| CB5 | Neo⁺WT⁺ | HCV-KLV | 0 | 0 | 0 | 0 | 38- | CAYLDDYKLSF | | | 9*01 | CASSVETTDYGY | 2154 |
| | | | | | | | 2/DV8*01 | | | | | TF | 2372 |
| CB6 | Neo⁺WT⁺ | FNDC3B | FNDC3B- | 0 | 0 | 0 | 41*01 F | CAVRLDDFGNVLH | | | 7-2*01 | CASSFAPGQGIE | 2155 |
| | | | L3M | | | | | C | | | | KLFF | 2373 |
| CC11 | Neo⁺WT⁺ | FNDC3B | FNDC3B- | 0 | 0 | 0 | 14/DV4*01 | CAMREGPSQAGT | | | 2*01 | CASSEVSVLYEQ | 2156 |
| | | | L3M | | | | | ALIF | | | | YF | 2374 |
| CC6 | Neo⁺WT⁺ | MLL2-L8H | MLL2 | 0 | 0 | 0 | 14/DV4*01 | CALYGGSQGNLIF | 17*01 | CATASLRNYGQ | 9*01 | CASSVETGGLDT | 2157 |
| | | | | | | | | | | NFVF | | QYF | 2291 |
| | | | | | | | | | | | | | 2375 |
| CC9 | Neo⁺WT⁺ | NSDHL- | NSDHL | 0 | 0 | 0 | 14/DV4*01 | CAMRGSDGQKLL | | | 9*01 | CASSRGGGTEAF | 2158 |
| | | A9V | | | | | | F | | | | F | 2376 |
| CD12 | Neo⁺WT⁺ | NSDHL- | NSDHL | 0 | 0 | 0 | 14/DV4*01 | CAMREPYSGAGS | | | 9*01 | CASGAQHTEAFF | 2159 |
| | | A9V | | | | | | YQLTF | | | | | 2377 |
| CD3 | Neo⁺WT⁺ | HCV-KLV | 0 | 0 | 0 | 0 | 38- | CAYFELDMRF | 26- | CIVRVDERGTS | 5-5*01 | CASSFEGQETQY | 2160 |
| | | | | | | | 2/DV8*01 | | 1*01 | YGKLTF | | F | 2292 |
| | | | | | | | | | | | | | 2378 |
| CE8 | Neo⁺WT⁺ | HCV-KLV | 0 | 0 | 0 | 0 | | | | | | | |
| CF10 | Neo⁺WT⁺ | FNDC3B | FNDC3B- | 0 | 0 | 0 | | | | | 10-3*01 | CAISELGYEQYF | 2379 |
| | | | L3M | | | | | | | | | | |
| CG6 | Neo⁺WT⁺ | HCV-KLV | 0 | 0 | 0 | 0 | | | | | 20-1*01 | CSATSEYTEAFF | 2380 |
| CH10 | Neo⁺WT⁺ | HCV-KLV | 0 | 0 | 0 | 0 | 38-2/ | CAYSTGDMRF | | | 10-3*01 | CAISSDRTDEQYF | 2161 |
| | | | | | | | DV8*01 | | | | | | 2381 |
| CH6 | Neo⁺WT⁺ | EMPTY | GNL3L | PABPC1 | 0 | 0 | 12-1*01 | CVVSPYNQGGKLI | | | 7-9*01 | CASSLDIGDQPQ | 2162 |
| | | | | | | | | F | | | | HF | 2382 |
| CH8 | Neo⁺WT⁺ | 0 | 0 | 0 | 0 | 0 | | | | | | | |
| AA1 | Neo⁺WT⁻ | MLL2-L8H | 0 | 0 | 0 | 0 | 5*01 | CAESRGTDKLIF | | | 2*01 | CASSFMETQYF | 2163 |
| | | | | | | | | | | | | | 2383 |
| AA10 | Neo⁺WT⁻ | GNL3L- | 0 | 0 | 0 | 0 | 6*01 | CALQTGANNLFF | | | 27*01 | CASSLWAGETQY | 2164 |
| | | R4C | | | | | | | | | | F | 2384 |
| AA11 | Neo⁺WT⁻ | GNL3L- | 0 | 0 | 0 | 0 | 5*01 | CAEYSSASKIIF | | | 11-3*01 | CASSLDYNEQFF | 2165 |
| | | R4C | | | | | | | | | | | 2385 |
| AA12 | Neo⁺WT⁻ | SEC24A- | 0 | 0 | 0 | 0 | 1-1*01 | CAVLNSGNTPLVF | | | 12- | CASSPGRTQYF | 2166 |
| | | P5L | | | | | | | | | 3*01,12- | | 2386 |
| | | | | | | | | | | | 4*01 | | |
| AA2 | Neo⁺WT⁻ | MLL2-L8H | 0 | 0 | 0 | 0 | 25*01 | CAGNYGGSQGNLI | 12- | CAVGAEYGNKL | 19*01 | CASSMAAGTHEQ | 2167 |
| | | | | | | | | F | 2*01 | VF | | YF | 2293 |
| | | | | | | | | | | | | | 2387 |
| AA3 | Neo⁺WT⁻ | GNL3L- | 0 | 0 | 0 | 0 | 26-2*01 | CILRDALIQAGNML | | | 20-1*01 | CSARTDRGNNYG | 2168 |
| | | R4C | | | | | | TF | | | | YTF | 2388 |
| AA4 | Neo⁺WT⁻ | GNL3L- | 0 | 0 | 0 | 0 | 12-2*01 | CAVNLNYGGSQG | | | 4-2*01 | CASSANQGYEQY | 2169 |
| | | R4C | | | | | | NLIF | | | | F | 2389 |
| AA5 | Neo⁺WT⁻ | GNL3L- | 0 | 0 | 0 | 0 | | | | | 2*01 | CASSEWGIEAFF | 2390 |
| | | R4C | | | | | | | | | | | |
| AA6 | Neo⁺WT⁻ | GNL3L- | 0 | 0 | 0 | 0 | 12-2*01 | CAVNPVQGAQKLV | | | 4-2*01 | CASSQVEGYEQY | 2170 |
| | | R4C | | | | | | F | | | | F | 2391 |
| AA7 | Neo⁺WT⁻ | GANAB- | 0 | 0 | 0 | 0 | 29/DV5*01 | CAASAGLAGSYQL | | | 6-1*01 | CASSEISSGGPFL | 2171 |
| | | S5F | | | | | | TF | | | | DTQYF | 2392 |
| AA8 | Neo⁺WT⁻ | GNL3L- | 0 | 0 | 0 | 0 | 13-1*01 | CAASEAF | | | 6-2*01,6- | CASSYSSRVNYE | 2172 |
| | | R4C | | | | | | | | | 3*01 | QYF | 2393 |
| AA9 | Neo⁺WT⁻ | 0 | 0 | 0 | 0 | 0 | 1-2*01 | CAVRESYGQNFVF | | | 7-6*01 | CASSSGLAGNST | 2173 |
| | | | | | | | | | | | | QYF | 2394 |
| AB1 | Neo⁺WT⁻ | 0 | 0 | 0 | 0 | 0 | 21*01 | CAVRGYSTLTF | | | 2*01 | CASTTGLEAFF | 2174 |
| | | | | | | | | | | | | | 2395 |
| AB10 | Neo⁺WT⁻ | GNL3L- | 0 | 0 | 0 | 0 | 22*01 | CAVVTTTDKLIF | | | 20-1*01 | CSARDLGGGGD | 2175 |
| | | R4C | | | | | | | | | | EQFF | 2396 |
| AB11 | Neo⁺WT⁻ | 0 | 0 | 0 | 0 | 0 | 12-2*01 | CAVMDDSWGKLQ | | | 5-1*01 | CASSLATGGGEQ | 2176 |
| | | | | | | | | F | | | | YF | 2397 |
| AB12 | Neo⁺WT⁻ | GNL3L- | 0 | 0 | 0 | 0 | 13-2*01 | CAVSNSGGSNYKL | | | 6-5*01 | CASSYGGISYGY | 2177 |
| | | R4C | | | | | | TF | | | | TF | 2398 |
| AB2 | Neo⁺WT⁻ | GNL3L- | 0 | 0 | 0 | 0 | 13-2*01 | CAETGQGGGADG | | | 6-5*01 | CASSYASGGYEQ | 2178 |
| | | R4C | | | | | | LTF | | | | YF | 2399 |
| AB3 | Neo⁺WT⁻ | NSDHL- | 0 | 0 | 0 | 0 | 3*01 | CAVRDMDNARLM | | | 9*01 | CASSVGGDIGIGY | 2179 |
| | | A9V | | | | | | F | | | | TF | 2400 |
| AB4 | Neo⁺WT⁻ | MRM1- | 0 | 0 | 0 | 0 | 3*01 | CAVRDQAGTALIF | | | 13*01 | CASSFGPVEQYF | 2180 |
| | | T6P | | | | | | | | | | | 2401 |
| AB5 | Neo⁺WT⁻ | GANAB- | 0 | 0 | 0 | 0 | 13-2*01 | CAETGDSNYQLIW | | | 15*01 | CATSEGLQYEQY | 2181 |
| | | S5F | | | | | | | | | | F | 2402 |
| AB6 | Neo⁺WT⁻ | GNL3L- | 0 | 0 | 0 | 0 | 22*01 | CAVRTSYDKVIF | | | 20-1*01 | CSVTQGDGTDTQ | 2182 |
| | | R4C | | | | | | | | | | YF | 2403 |
| AB7 | Neo⁺WT⁻ | PGM5- | 0 | 0 | 0 | 0 | 12-3*01 | CAMSATASGTYKY | | | 9*01 | CASSVEGAHPIQ | 2183 |
| | | H5Y | | | | | | IF | | | | ETQYF | 2404 |
| AB8 | Neo⁺WT⁻ | SEC24A- | 0 | 0 | 0 | 0 | 12-1*01 | CVVNQRGGGADG | | | 13*01 | CASSLGQTVTQE | 2184 |
| | | P5L | | | | | | LTF | | | | TQYF | 2405 |
| AB9 | Neo⁺WT⁻ | 0 | 0 | 0 | 0 | 0 | 19*01 | CALSEAENDYKLS | | | 3-1*01 | CASSQDLTASYY | 2185 |
| | | | | | | | | F | | | | NEQFF | 2406 |
| AC1 | Neo⁺WT⁻ | GNL3L- | 0 | 0 | 0 | 0 | 5*01 | CAESLRPGGGAD | | | 9*01 | CASSVAAGGAYE | 2186 |
| | | R4C | | | | | | GLTF | | | | QYF | 2407 |
| AC10 | Neo⁺WT⁻ | FNDC3B- | 0 | 0 | 0 | 0 | 20*01 | CAVQASSGAGSY | | | 4-2*01 | CASRGPYNEQFF | 2187 |
| | | L3M | | | | | | QLTF | | | | | 2408 |
| AC11 | Neo⁺WT⁻ | PGM5- | 0 | 0 | 0 | 0 | 8-3*01 | CAVGGGSQGNLIF | | | 13*01 | CASSLATEQFF | 2188 |
| | | H5Y | | | | | | | | | | | 2409 |
| AC12 | Neo⁺WT⁻ | SEC24A- | 0 | 0 | 0 | 0 | 16*01 | CALRDSSGGSYIP | 21*01 | CAVTWGHNNA | 7-6*01 | CASSLESTANTE | 2189 |
| | | P5L | | | | | | TF | | GNMLTF | | AFF | 2294 |
| | | | | | | | | | | | | | 2410 |
| AC2 | Neo⁺WT⁻ | GNL3L- | 0 | 0 | 0 | 0 | | | | | 5-8*01 | CASNPGPTYGYT | 2411 |
| | | R4C | | | | | | | | | | F | |
| AC3 | Neo⁺WT⁻ | GNL3L- | 0 | 0 | 0 | 0 | 10*01 | CVTGTNAGKSTF | 12- | CALLLGGGADG | 2*01 | CAIMSSGRADGE | 2190 |
| | | R4C | | | | | | | 2*01 | LTF | | LFF | 2295 |
| | | | | | | | | | | | | | 2412 |
| AC4 | Neo⁺WT⁻ | NSDHL- | 0 | 0 | 0 | 0 | 9-2*01 | CALSDSVNNAGN | | | 9*01 | CASSQGSDEQYF | 2191 |
| | | A9V | | | | | | MLTF | | | | | 2413 |
| AC5 | Neo⁺WT⁻ | GNL3L- | 0 | 0 | 0 | 0 | 26-1*01 | CIVRGDIKAAGNKL | 12- | CAMIGNSGNTP | 6-5*01 | CASSYGGAYEQY | 2192 |
| | | R4C | | | | | | TF | 3*01 | LVF | | F | 2296 |
| | | | | | | | | | | | | | 2414 |
| AC6 | Neo⁺WT⁻ | NSDHL- | 0 | 0 | 0 | 0 | 9-2*01 | CALADMNRDDKIIF | | | 9*01 | CASSVDPGQSYE | 2193 |
| | | A9V | | | | | | | | | | QYF | 2415 |
| AC7 | Neo⁺WT⁻ | WDR46- | 0 | 0 | 0 | 0 | 12-2*01 | CAVKGGGSYIPTF | | | | | 2194 |
| | | T3I | | | | | | | | | | | |
| AC8 | Neo⁺WT⁻ | GNL3L- | 0 | 0 | 0 | 0 | 20*01 | CAIHRGPGAGSYQ | | | 19*01 | CASSIVDGYEQY | 2195 |
| | | R4C | | | | | | LTF | | | | F | 2416 |
| AC9 | Neo⁺WT⁻ | NSDHL- | 0 | 0 | 0 | 0 | 14/DV4*01 | CAMREPDSNYQLI | 13- | CAENRNAGNN | 9*01 | CASSGFRGELFF | 2196 |
| | | A9V | | | | | | W | 2*01 | RKLIW | | | 2297 |
| | | | | | | | | | | | | | 2417 |
| AD1 | Neo⁺WT⁻ | GNL3L- | 0 | 0 | 0 | 0 | 12-2*01 | CAVYSSASKIIF | | | 6-5*01 | CASSYGQGYEQY | 2197 |
| | | R4C | | | | | | | | | | F | 2418 |
| AD10 | Neo⁺WT⁻ | MLL2-L8H | 0 | 0 | 0 | 0 | 19*01 | CALRENYNNNDM | 16*01 | CALSNAGNNRK | 3-1*01 | CASSQVGGSYPR | 2198 |
| | | | | | | | | RF | | LIW | | EQFF | 2298 |
| | | | | | | | | | | | | | 2419 |
| AD11 | Neo⁺WT⁻ | GNL3L- | 0 | 0 | 0 | 0 | 22*01 | CAVKTSYDKVIF | | | 28*01 | CASSRGGHEQYF | 2199 |
| | | R4C | | | | | | | | | | | 2420 |
| AD12 | Neo⁺WT⁻ | GNL3L- | 0 | 0 | 0 | 0 | 10*01 | CVVTTTGGGYNKL | 1-2*01 | CAVRDTGGGN | 2*01 | CASSDPNDYEQY | 2200 |
| | | R4C | | | | | | IF | | KLTF | | F | 2299 |
| | | | | | | | | | | | | | 2421 |
| AD2 | Neo⁺WT⁻ | GNL3L- | 0 | 0 | 0 | 0 | 13-1*01 | CAATPTNAGKSTF | | | 19*01 | CASSIVGQGYEQ | 2201 |
| | | R4C | | | | | | | | | | YF | 2422 |
| AD3 | Neo⁺WT⁻ | GNL3L- | 0 | 0 | 0 | 0 | 35*01 | CAGHNNNAGNML | | | | | 2202 |
| | | R4C | | | | | | TF | | | | | |
| AD4 | Neo⁺WT⁻ | MLL2-L8H | 0 | 0 | 0 | 0 | 12-3*01 | CASGEYYGQNFVF | | | 19*01 | CASSMGGVGTEA | 2203 |
| | | | | | | | | | | | | FF | 2423 |
| AD5 | Neo⁺WT⁻ | GNL3L- | 0 | 0 | 0 | 0 | 6*01 | CALSGYSTLTF | | | 4-2*01 | CASSPYSNQPQH | 2123 |
| | | R4C | | | | | | | | | | F | 2424 |
| AD6 | Neo⁺WT⁻ | GNL3L- | 0 | 0 | 0 | 0 | 22*01 | CAVKTSYDKVIF | | | | | 2199 |
| | | R4C | | | | | | | | | | | |
| AD7 | Neo⁺WT⁻ | MLL2-L8H | 0 | 0 | 0 | 0 | 12-2*01 | CAVGGYNFNKFYF | 12- | CVALRGGSQG | 5-6*01 | CASSFRDSSYEQ | 2204 |
| | | | | | | | | | 1*01 | NLIF | | YF | 2300 |
| | | | | | | | | | | | | | 2425 |
| AD8 | Neo⁺WT⁻ | GNL3L- | 0 | 0 | 0 | 0 | 19*01 | CALSEADTGGFKTI | | | 6-6*01 | CASSYSVKGQDY | 2205 |
| | | R4C | | | | | | F | | | | SYEQYF | 2426 |
| AD9 | Neo⁺WT⁻ | MLL2-L8H | 0 | 0 | 0 | 0 | 25*01 | CAGTGAGSYQLTF | | | 6-5*01 | CASRLHGGTPSY | 2206 |
| | | | | | | | | | | | | EQYF | 2427 |
| AE1 | Neo⁺WT⁻ | PGM5- | 0 | 0 | 0 | 0 | 3*01 | CAVRDMQDSNYQ | | | 9*01 | CASSVEGSTEAF | 2207 |
| | | H5Y | | | | | | LIW | | | | F | 2428 |
| AE10 | Neo⁺WT⁻ | GNL3L- | 0 | 0 | 0 | 0 | | | | | 4-2*01 | CASSQAGGYEQY | 2429 |
| | | R4C | | | | | | | | | | F | |
| AE11 | Neo⁺WT⁻ | TEAD1- | 0 | 0 | 0 | 0 | 14/DV4*01 | CAMRANSGGYQK | | | 5-5*01 | CASTQPVDMNTE | 2208 |
| | | L9F | | | | | | VTF | | | | AFF | 2430 |
| AE12 | Neo⁺WT⁻ | SMARCD3- | 0 | 0 | 0 | 0 | | | | | 28*01 | CASSLYRGGDTQ | 2431 |
| | | H8Y | | | | | | | | | | YF | |
| AE2 | Neo⁺WT⁻ | GNL3L- | 0 | 0 | 0 | 0 | 6*01 | CALQTGANNLFF | | | 27*01 | CASSLWAGETQY | 2164 |
| | | R4C | | | | | | | | | | F | 2384 |
| AE3 | Neo⁺WT⁻ | GNL3L- | 0 | 0 | 0 | 0 | 6*01 | CALQTGANNLFF | | | 27*01 | CASSLWAGETQY | 2164 |
| | | R4C | | | | | | | | | | F | 2384 |
| AE4 | Neo⁺WT⁻ | MLL2-L8H | 0 | 0 | 0 | 0 | 12-2*01 | CAVGGYNFNKFYF | 12- | CVALRGGSQG | 5-6*01 | CASSFRDSSYEQ | 2204 |
| | | | | | | | | | 1*01 | NLIF | | YF | 2300 |
| | | | | | | | | | | | | | 2425 |
| AE5 | Neo⁺WT⁻ | FNDC3B- | 0 | 0 | 0 | 0 | 3*01 | CAVRDRAGGYQK | 13- | CAEIGNTGGFK | 13*01 | CASSSRLSQETQ | 2209 |
| | | L3M | | | | | | VTF | 2*01 | TIF | | YF | 2301 |
| | | | | | | | | | | | | | 2432 |
| AE6 | Neo⁺WT⁻ | PGM5- | 0 | 0 | 0 | 0 | 10*01 | CVVSLDYIPTF | | | 9*01 | CASSVEGSGETQ | 2210 |
| | | H5Y | | | | | | | | | | YF | 2433 |
| AE7 | Neo⁺WT⁻ | GNL3L- | 0 | 0 | 0 | 0 | 5*01 | CAEKNTDKLIF | 12- | CAVNRDDYKLS | 9*01 | CASSVSQGGYEQ | 2211 |
| | | R4C | | | | | | | 2*01 | F | | YF | 2302 |
| | | | | | | | | | | | | | 2434 |
| AE8 | Neo⁺WT⁻ | GNL3L- | 0 | 0 | 0 | 0 | 22*01 | CAVRTSYDKVIF | | | 20-1*01 | CSAPGGSGANVL | 2182 |
| | | R4C | | | | | | | | | | TF | 2435 |
| AE9 | Neo⁺WT⁻ | GANAB- | 0 | 0 | 0 | 0 | 8-3*01 | CAVAVWGNNAGN | 12- | CAVLTDSWGKL | 6-5*01 | CASSNVLAGGRD | 2212 |
| | | S5F | | | | | | MLTF | 2*01 | QF | | TQYF | 2303 |
| | | | | | | | | | | | | | 2436 |
| AF1 | Neo⁺WT⁻ | PGM5- | 0 | 0 | 0 | 0 | 8-2*01 | CVVSNSGNTPLVF | | | 7-9*01 | CASSLGDRGPQP | 2213 |
| | | H5Y | | | | | | | | | | QHF | 2437 |
| AF10 | Neo⁺WT⁻ | GNL3L- | 0 | 0 | 0 | 0 | 19*01 | CALSEANDGQKLL | | | 6-2*01,6- | CASTLAGGPYEQ | 2214 |
| | | R4C | | | | | | F | | | 3*01 | YF | 2438 |
| AF11 | Neo⁺WT⁻ | GANAB- | 0 | 0 | 0 | 0 | 1-1*01 | CAVSLYNQGGKLI | | | 19*01 | CASTGTDSYEQY | 2215 |
| | | S5F | | | | | | F | | | | F | 2439 |
| AF12 | Neo⁺WT⁻ | GNL3L- | 0 | 0 | 0 | 0 | 22*01 | CAVETSYDKVIF | | | | | 2216 |
| | | R4C | | | | | | | | | | | |
| AF2 | Neo⁺WT⁻ | GANAB- | 0 | 0 | 0 | 0 | 14/DV4*01 | CAMREPSQGGSE | | | 27*01 | CASSNQETQYF | 2217 |
| | | S5F | | | | | | KLVF | | | | | 2440 |
| AF3 | Neo⁺WT⁻ | GNL3L- | 0 | 0 | 0 | 0 | 38- | CASAGTSYDKVIF | | | 20-1*01 | CSVRTPSSYEQY | 2218 |
| | | R4C | | | | | 2/DV8*01 | | | | | F | 2441 |
| AF4 | Neo⁺WT⁻ | GNL3L- | 0 | 0 | 0 | 0 | 13-2*01 | CAESSSGSARQLT | | | 4-3*01 | CASSQVPGGYEQ | 2219 |
| | | R4C | | | | | | F | | | | YF | 2442 |
| AF5 | Neo⁺WT⁻ | GANAB- | 0 | 0 | 0 | 0 | 29/DV5*01 | CAASAQGGTSYG | | | 19*01 | CASRMGTSGSTD | 2220 |
| | | S5F | | | | | | KLTF | | | | TQYF | 2443 |
| AF6 | Neo⁺WT⁻ | GNL3L- | 0 | 0 | 0 | 0 | | | | | 20-1*01 | CSALGLAGGQGG | 2444 |
| | | R4C | | | | | | | | | | ELFF | |
| AF7 | Neo⁺WT⁻ | GNL3L- | 0 | 0 | 0 | 0 | 22*01 | CAVKTSYDKVIF | | | 20-1*01 | CSAGVYEQYF | 2199 |
| | | R4C | | | | | | | | | | | 2445 |
| AF8 | Neo⁺WT⁻ | GNL3L- | 0 | 0 | 0 | 0 | 12-2*01 | CAVFYGNNRLAF | | | 9*01 | CASSVWDSLTGE | 2221 |
| | | R4C | | | | | | | | | | LFF | 2446 |
| AF9 | Neo⁺WT⁻ | GNL3L- | 0 | 0 | 0 | 0 | 22*01 | CAVRTSYDKVIF | | | 19*01 | CASSWDNGGYT | 2182 |
| | | R4C | | | | | | | | | | F | 2447 |
| CA1 | Neo⁺WT⁻ | NSDHL- | 0 | 0 | 0 | 0 | 19*01 | CALSEVITGANNLF | | | 9*01 | CASSVGSQETQY | 2222 |
| | | A9V | | | | | | F | | | | F | 2448 |
| CA10 | Neo⁺WT⁻ | PGM5- | 0 | 0 | 0 | 0 | 1-1*01 | CAVRDWYGGSQG | | | 6-1*01 | CASILGLTTYNEQ | 2223 |
| | | H5Y | | | | | | NLIF | | | | FF | 2449 |
| CA11 | Neo⁺WT⁻ | GNL3L- | 0 | 0 | 0 | 0 | 29/DV5*01 | CAGADKLIF | 27*01 | CAGDGGSQGN | 6-5*01 | CASSWTGAGYE | 2224 |
| | | R4C | | | | | | | | LIF | | QYF | 2304 |
| | | | | | | | | | | | | | 2450 |
| CA12 | Neo⁺WT⁻ | 0 | 0 | 0 | 0 | 0 | 5*01 | CAESSFYVSGGYN | | | 11-3*01 | CASSLGETQYF | 2225 |
| | | | | | | | | KLIF | | | | | 2451 |
| CA2 | Neo⁺WT⁻ | GNL3L- | 0 | 0 | 0 | 0 | 8-2*01 | CVVSDKEWGGGA | | | 14*01 | | 2226 |
| | | R4C | | | | | | DGLTF | | | | | |
| CA3 | Neo⁺WT⁻ | 0 | 0 | 0 | 0 | 0 | | | | | 2*01 | CASRYREGVEKL | 2452 |
| | | | | | | | | | | | | FF | |
| CA4 | Neo⁺WT⁻ | 0 | 0 | 0 | 0 | 0 | | | | | | | |
| CA7 | Neo⁺WT⁻ | 0 | 0 | 0 | 0 | 0 | 13-1*01 | CAAPRNDKIIF | | | 6-5*01 | CASSYSGPTGYE | 2227 |
| | | | | | | | | | | | | QYF | 2453 |
| CA8 | Neo⁺WT⁻ | GANAB- | 0 | 0 | 0 | 0 | 7*01 | CALGELVTGGGNK | | | 5-6*01 | CASSLNREGNTE | 2228 |
| | | S5F | | | | | | LTF | | | | AFF | 2454 |
| CA9 | Neo⁺WT⁻ | MLL2-L8H | 0 | 0 | 0 | 0 | 12-2*01 | CAVISNQFYF | | | 6-5*01 | CASSYEGALSYE | 2229 |
| | | | | | | | | | | | | QYF | 2455 |
| CB1 | Neo⁺WT⁻ | GNL3L- | 0 | 0 | 0 | 0 | 25*01 F | PNYGGSQGNLIF | | | 20-1*01 | CSAREGLAAGEL | 2230 |
| | | R4C | | | | | | | | | | FF | 2456 |
| CB10 | Neo⁺WT⁻ | GNL3L- | 0 | 0 | 0 | 0 | 12-2*01 | CAVNPRDDKIIF | | | 3-1*01 | CASSPGQGLAYE | 2231 |
| | | R4C | | | | | | | | | | QYF | 2457 |
| CB11 | Neo⁺WT⁻ | FNDC3B- | 0 | 0 | 0 | 0 | 12-2*01 | CAVKDRGGSEKLV | | | 6-6*01 | CASRDSLTGELF | 2232 |
| | | L3M | | | | | | F | | | | F | 2458 |
| CB12 | Neo⁺WT⁻ | GNL3L- | 0 | 0 | 0 | 0 | | | | | 6-5*01 | CASSPSGGSYGY | 2459 |
| | | R4C | | | | | | | | | | TF | |
| CB2 | Neo⁺WT⁻ | GNL3L- | 0 | 0 | 0 | 0 | 13-1*01 | CAASNDQKLVF | | | 9*01 | CASSISTSGYEQF | 2233 |
| | | R4C | | | | | | | | | | F | 2460 |
| CB3 | Neo⁺WT⁻ | GNL3L- | 0 | 0 | 0 | 0 | 13-1*01 | CAAFSNQAGTALIF | | | 6-5*01 | CASSYSNGGYGY | 2234 |
| | | R4C | | | | | | | | | | TF | 2461 |
| CB7 | Neo⁺WT⁻ | 0 | 0 | 0 | 0 | 0 | | | | | 7-2*01 | CASSFWTSGGE | 2462 |
| | | | | | | | | | | | | QYF | |
| CB8 | Neo⁺WT⁻ | 0 | 0 | 0 | 0 | 0 | 8-3*01 | CAVGFDNNAGNM | | | 10-3*01 | CAISERWDGYNE | 2235 |
| | | | | | | | | LTF | | | | QFF | 2463 |
| CC1 | Neo⁺WT⁻ | GNL3L- | 0 | 0 | 0 | 0 | | | | | 7-6*01 | CASSFLGDEQFF | 2464 |
| | | R4C | | | | | | | | | | | |
| CC10 | Neo⁺WT⁻ | NSDHL- | 0 | 0 | 0 | 0 | | | | | 15*01 | CATSRDLGGQQP | 2465 |
| | | A9V | | | | | | | | | | QHF | |
| CC12 | Neo⁺WT⁻ | GNL3L- | 0 | 0 | 0 | 0 | 22*01 | CAVYSSASKIIF | 10*01 | CVVNPYNTDKLI | 4-3*01 | CASSVGEGTEAF | 2197 |
| | | R4C | | | | | | | | F | | F | 2305 |
| | | | | | | | | | | | | | 2466 |
| CC2 | Neo⁺WT⁻ | USP28- | 0 | 0 | 0 | 0 | 30*01 | CGTRGGSGNTPL | 35*01 | CAGQMYSGGG | 12- | CASTATFGVTEA | 2236 |
| | | C5F | | | | | | VF | | ADGLTF | 3*01,12- | FF | 2306 |
| | | | | | | | | | | | 4*01 | | 2467 |
| CC3 | Neo⁺WT⁻ | GNL3L- | 0 | 0 | 0 | 0 | 12-2*01 | CAVANDYKLSF | | | 6-5*01 | CASSYSLAAEAFF | 2237 |
| | | R4C | | | | | | | | | | | 2468 |
| CC4 | Neo⁺WT⁻ | MRM1- | 0 | 0 | 0 | 0 | | | | | 14*01 | CASSLTGSEQYF | 2469 |
| | | T6P | | | | | | | | | | | |
| CC7 | Neo⁺WT⁻ | 0 | 0 | 0 | 0 | 0 | 12-2*01 | CALLTEDSNYQLI | | | 2*01 | CASSGELGSPLH | 2238 |
| | | | | | | | | W | | | | F | 2470 |
| CD1 | Neo⁺WT⁻ | GANAB- | 0 | 0 | 0 | 0 | 8-1*01 | CAVIPDSNYQLIW | | | 5-8*01 | CASSSLGEQFF | 2239 |
| | | S5F | | | | | | | | | | | 2471 |
| CD10 | Neo⁺WT⁻ | AKAP13- | 0 | 0 | 0 | 0 | 38- | CAYYTPLVF | | | 6-2*01,6- | CASTDTGELFF | 2240 |
| | | Q8K | | | | | 2/DV8*01 | | | | 3*01 | | 2472 |
| CD11 | Neo⁺WT⁻ | GNL3L- | 0 | 0 | 0 | 0 | 22*01 | CAVRTSYDKVIF | | | 29-1*01 | CSVEGPGGRIAN | 2182 |
| | | R4C | | | | | | | | | | TEAFF | 2473 |
| CD2 | Neo⁺WT⁻ | GNL3L- | 0 | 0 | 0 | 0 | | | | | 27*01 | CASSLWAGETQY | 2384 |
| | | R4C | | | | | | | | | | F | |
| CD4 | Neo⁺WT⁻ | NSDHL- | 0 | 0 | 0 | 0 | | | | | 5-5*01 | CASSARGYDEQF | 2474 |
| | | A9V | | | | | | | | | | F | |
| CD5 | Neo⁺WT⁻ | GNL3L- | 0 | 0 | 0 | 0 | 22*01 | CAVDPNTGNQFYF | | | 20-1*01 | CSARASGAYEQY | 2241 |
| | | R4C | | | | | | | | | | F | 2475 |
| CD7 | Neo⁺WT⁻ | 0 | 0 | 0 | 0 | 0 | 12-2*01 | CAVNTGNQFYF | | | 6-5*01 | CASSYANGYEQY | 2242 |
| | | | | | | | | | | | | F | 2476 |
| CD8 | Neo⁺WT⁻ | GNL3L- | 0 | 0 | 0 | 0 | | | | | | | |
| | | R4C | | | | | | | | | | | |
| CD9 | Neo⁺WT⁻ | USP28- | 0 | 0 | 0 | 0 | 30*01 | CGTRGGSGNTPL | 35*01 | CAGQMYSGGG | 12- | CASTATFGVTEA | 2236 |
| | | C5F | | | | | | VF | | ADGLTF | 3*01,12- | FF | 2306 |
| | | | | | | | | | | | 4*01 | | 2467 |
| CE1 | Neo⁺WT⁻ | 0 | 0 | 0 | 0 | 0 | | | | | 7-7*01 | CASSWGGGYEQ | 2477 |
| | | | | | | | | | | | | YF | |
| CE10 | Neo⁺WT⁻ | GNL3L- | 0 | 0 | 0 | 0 | 12-2*01 | CAVLLYGNKLVF | | | 6-1*01 | CASNQGLYEQYF | 2243 |
| | | R4C | | | | | | | | | | | 2478 |
| CE11 | Neo⁺WT⁻ | TEAD1- | 0 | 0 | 0 | 0 | 38- | CALTQGGSEKLVF | | | 19*01 | CASSIAQGGNQP | 2244 |
| | | L8F | | | | | 2/DV8*01 | | | | | QHF | 2479 |
| CE12 | Neo⁺WT⁻ | GNL3L- | 0 | 0 | 0 | 0 | | | | | | | |
| | | R4C | | | | | | | | | | | |
| CE2 | Neo⁺WT⁻ | GANAB- | 0 | 0 | 0 | 0 | 12-2*01 | CAVTTDSWGKLQF | | | 6-2*01,6- | CASSRQPMNTEA | 2245 |
| | | S5F | | | | | | | | | 3*01 | FF | 2480 |
| CE3 | Neo⁺WT⁻ | MLL2-L8H | 0 | 0 | 0 | 0 | | | | | 6-2*01,6- | CASSYSLEGYTF | 2481 |
| | | | | | | | | | | | 3*01 | | |
| CE4 | Neo⁺WT⁻ | SEC24A- | 0 | 0 | 0 | 0 | 26-1*01 | CIVRVDNARLMF | 26- | CIVRVRDSNYQ | 7-9*01 | | 2246 |
| | | P5L | | | | | | | 1*01 | LIW | | | 2307 |
| CE5 | Neo⁺WT⁻ | GNL3L- | 0 | 0 | 0 | 0 | 22*01 | CAVKTSYDKVIF | | | 20-1*01 | CSARVTSGSYEQ | 2199 |
| | | R4C | | | | | | | | | | YF | 2482 |
| CE6 | Neo⁺WT⁻ | 0 | 0 | 0 | 0 | 0 | | | | | | | |
| CE7 | Neo⁺WT⁻ | GANAB- | 0 | 0 | 0 | 0 | 14/DV4*01 | CAMREDAGGTSY | | | 29-1*01 | CSVGTYSNQPQH | 2247 |
| | | S5F | | | | | | GKLTF | | | | F | 2483 |
| CE9 | Neo⁺WT⁻ | GNL3L- | 0 | 0 | 0 | 0 | 12-2*01 | CAVGNSGGYQKV | | | 6-1*01 | CASSEGGYTEAF | 2248 |
| | | R4C | | | | | | TF | | | | F | 2484 |
| CF1 | Neo⁺WT⁻ | GNL3L- | 0 | 0 | 0 | 0 | | | | | 3-1*01 | CASSPGDGTEAF | 2485 |
| | | R4C | | | | | | | | | | F | |
| CF11 | Neo⁺WT⁻ | MRM1- | 0 | 0 | 0 | 0 | 24*01 | CAFSDGQKLLF | | | 7-9*01 | CASSLPPADMRD | 2249 |
| | | T6P | | | | | | | | | | TQYF | 2486 |
| CF12 | Neo⁺WT⁻ | GNL3L- | 0 | 0 | 0 | 0 | 22*01 | CAVKTSYDKVIF | | | 20-1*01 | CSSVTEAFF | 2199 |
| | | R4C | | | | | | | | | | | 2487 |
| CF2 | Neo⁺WT⁻ | WDR46- | 0 | 0 | 0 | 0 | 8-1*01 | CAVKMDSNYQLIW | | | 4-2*01 | CASSQDRGNEQF | 2250 |
| | | T3I | | | | | | | | | | F | 2488 |
| CF3 | Neo⁺WT⁻ | PGM5- | 0 | 0 | 0 | 0 | | | | | 20-1*01 | | |
| | | H5Y | | | | | | | | | | | |
| CF4 | Neo⁺WT⁻ | PABPC1- | 0 | 0 | 0 | 0 | | | | | 7-9*01 | CASSFGSGEQFF | 2489 |
| | | R5Q | | | | | | | | | | | |
| CF5 | Neo⁺WT⁻ | GANAB- | 0 | 0 | 0 | 0 | 12-2*01 | CAVTGSGYALNF | | | 4-3*01 | CASSQAHTGELF | 2251 |
| | | S5F | | | | | | | | | | F | 2490 |
| CF6 | Neo⁺WT⁻ | 0 | 0 | 0 | 0 | 0 | | | | | | | |
| CF7 | Neo⁺WT⁻ | GNL3L- | 0 | 0 | 0 | 0 | | | | | 4-3*01 | CASSQDRDSGYY | 2491 |
| | | R4C | | | | | | | | | | EQYF | |
| CF8 | Neo⁺WT⁻ | GNL3L- | 0 | 0 | 0 | 0 | 13-1*01 | CAATSNTGKLIF | 13- | CAAFSHTNAGK | 6-5*01 | CASSYSSGYFLF | 2252 |
| | | R4C | | | | | | | 1*01 | STF | | F | 2308 |
| | | | | | | | | | | | | | 2492 |
| CF9 | Neo⁺WT⁻ | GNL3L- | 0 | 0 | 0 | 0 | 12-1*01 | CVGMDSSYKLIF | | | 6-5*01 | CASSPSTGYGYT | 2253 |
| | | R4C | | | | | | | | | | F | 2493 |
| CG1 | Neo⁺WT⁻ | GANAB- | 0 | 0 | 0 | 0 | | | | | 19*01 | CASSTGNYGYTF | 2494 |
| | | S5F | | | | | | | | | | | |
| CG10 | Neo⁺WT⁻ | GNL3L- | 0 | 0 | 0 | 0 | | | | | | | |
| | | R4C | | | | | | | | | | | |
| CG11 | Neo⁺WT⁻ | GNL3L- | 0 | 0 | 0 | 0 | | | | | | | |
| | | R4C | | | | | | | | | | | |
| CG12 | Neo⁺WT⁻ | MRM1- | 0 | 0 | 0 | 0 | 21*01 | CAVRYYFGNEKLT | | | 5-1*01 | CASSLIQGAVDT | 2254 |
| | | T6P | | | | | | F | | | | QYF | 2495 |
| CG2 | Neo⁺WT⁻ | GNL3L- | 0 | 0 | 0 | 0 | 6*01 | CALQTGANNLFF | 14/DV | CAMIFNDYKLSF | 27*01 | CASSLWAGETQY | 2164 |
| | | R4C | | | | | | | 4*01 | | | F | 2261 |
| | | | | | | | | | | | | | 2384 |
| CG3 | Neo⁺WT⁻ | GNL3L- | 0 | 0 | 0 | 0 | | | | | 6-5*01 | CASSFGQGYEQY | 2496 |
| | | R4C | | | | | | | | | | F | |
| CG4 | Neo⁺WT⁻ | GANAB- | 0 | 0 | 0 | 0 | 21*01 | CAASGGGADGLTF | | | 6-5*01 | CASSPWTLNEQY | 2255 |
| | | S5F | | | | | | | | | | F | 2497 |
| CG5 | Neo⁺WT⁻ | PABPC1- | 0 | 0 | 0 | 0 | 12-2*01 | CAVIPRGGSNYKL | | | 6-2*01,6- | CASSYGNTGELF | 2256 |
| | | R5Q | | | | | | TF | | | 3*01 | F | 2498 |
| CG7 | Neo⁺WT⁻ | GNL3L- | 0 | 0 | 0 | 0 | 13-1*01 | CAYGGGTYKYIF | | | 6-2*01,6- | CASSYSDRSSYE | 2257 |
| | | R4C | | | | | | | | | 3*01 | QYF | 2499 |
| CG8 | Neo⁺WT⁻ | GNL3L- | 0 | 0 | 0 | 0 | 12-2*01 | CAVMTGGFKTIF | | | 6-5*01 | CASSYGGGYEQY | 2258 |
| | | R4C | | | | | | | | | | F | 2500 |
| CG9 | Neo⁺WT⁻ | PGM5- | 0 | 0 | 0 | 0 | | | | | | | |
| | | H5Y | | | | | | | | | | | |
| CH12 | Neo⁺WT⁻ | USP28- | 0 | 0 | 0 | 0 | 19*01 | CALTQSGGYQKVT | | | 2*01 | CASREGLEDTEA | 2259 |
| | | C5F | | | | | | F | | | | FF | 2501 |
| CH7 | Neo⁺WT⁻ | PGM5- | 0 | 0 | 0 | 0 | 19*01 | CALGDYKLSF | | | 13*01 | CASTEGQGGEQ | 2260 |
| | | H5Y | | | | | | | | | | YF | 2502 |
| CH9 | Neo⁺WT⁻ | GNL3L- | 0 | 0 | 0 | 0 | | | | | 29-1*01 | CSPGDGYTF | 2503 |
| | | R4C | | | | | | | | | | | |
| AG1 | Spike-In | HCV-KLV | 0 | 0 | 0 | 0 | 14/DV4*01 | CAMIFNDYKLSF | | | 19*01 | CASSTGNYGYTF | 2261 |
| | Clone | | | | | | | | | | | | 2494 |
| AG10 | Spike-In | HCV-KLV | 0 | 0 | 0 | 0 | 14/DV4*01 | CAMIFNDYKLSF | | | 19*01 | CASSTGNYGYTF | 2261 |
| | Clone | | | | | | | | | | | | 2494 |
| AG11 | Spike-In | HCV-KLV | 0 | 0 | 0 | 0 | 14/DV4*01 | CAMIFNDYKLSF | | | 19*01 | CASSTGNYGYTF | 2261 |
| | Clone | | | | | | | | | | | | 2494 |
| AG12 | Spike-In | HCV-KLV | 0 | 0 | 0 | 0 | 14/DV4*01 | CAMIFNDYKLSF | | | 19*01 | CASSTGNYGYTF | 2261 |
| | Clone | | | | | | | | | | | | 2494 |
| AG2 | Spike-In | HCV-KLV | 0 | 0 | 0 | 0 | 14/DV4*01 | CAMIFNDYKLSF | | | 19*01 | CASSTGNYGYTF | 2261 |
| | Clone | | | | | | | | | | | | 2494 |
| AG3 | Spike-In | HCV-KLV | 0 | 0 | 0 | 0 | 14/DV4*01 | CAMIFNDYKLSF | | | 19*01 | CASSTGNYGYTF | 2261 |
| | Clone | | | | | | | | | | | | 2494 |
| AG4 | Spike-In | HCV-KLV | 0 | 0 | 0 | 0 | 14/DV4*01 | CAMIFNDYKLSF | | | 19*01 | CASSTGNYGYTF | 2261 |
| | Clone | | | | | | | | | | | | 2494 |
| AG5 | Spike-In | HCV-KLV | 0 | 0 | 0 | 0 | 14/DV4*01 | CAMIFNDYKLSF | | | 19*01 | CASSTGNYGYTF | 2261 |
| | Clone | | | | | | | | | | | | 2494 |
| AG6 | Spike-In | HCV-KLV | 0 | 0 | 0 | 0 | 14/DV4*01 | CAMIFNDYKLSF | | | 19*01 | CASSTGNYGYTF | 2261 |
| | Clone | | | | | | | | | | | | 2494 |
| AG7 | Spike-In | HCV-KLV | 0 | 0 | 0 | 0 | 14/DV4*01 | CAMIFNDYKLSF | | | 19*01 | CASSTGNYGYTF | 2261 |
| | Clone | | | | | | | | | | | | 2494 |
| AG8 | Spike-In | HCV-KLV | 0 | 0 | 0 | 0 | 14/DV4*01 | CAMIFNDYKLSF | | | 19*01 | CASSTGNYGYTF | 2261 |
| | Clone | | | | | | | | | | | | 2494 |
| AG9 | Spike-In | HCV-KLV | 0 | 0 | 0 | 0 | 14/DV4*01 | CAMIFNDYKLSF | | | 19*01 | CASSTGNYGYTF | 2261 |
| | Clone | | | | | | | | | | | | 2494 |
| BA12 | Neo⁻WT⁺ | ERBB2 | 0 | 0 | 0 | 0 | 8-4*01 | CAVSDLNSGGYQ | | | 18*01 | CASSPRDRVHEQ | 2262 |
| | | | | | | | | KVTF | | | | YF | 2504 |
| BA4 | Neo⁻WT⁺ | GANAB | 0 | 0 | 0 | 0 | 12-2*01 | CAVNNARLMF | | | 4-3*01 | CASSQGGGGTD | 2263 |
| | | | | | | | | | | | | TQYF | 2505 |
| BA5 | Neo⁻WT⁺ | MRM1 | 0 | 0 | 0 | 0 | 12-2*01 | CAVNNARLMF | | | 4-1*01 | CASSPSPGSEQY | 2263 |
| | | | | | | | | | | | | F | 2506 |
| BA7 | Neo⁻WT⁺ | GANAB | 0 | 0 | 0 | 0 | 12-2*01 | CAIEGGKLIF | | | 2*01 | CASSDWGGETQ | 2264 |
| | | | | | | | | | | | | YF | 2507 |
| BB2 | Neo⁻WT⁺ | GANAB | 0 | 0 | 0 | 0 | 12-2*01 | CAVNNARLMF | | | 4-3*01 | CASSQGGGGTD | 2263 |
| | | | | | | | | | | | | TQYF | 2505 |
| BB3 | Neo⁻WT⁺ | GANAB | 0 | 0 | 0 | 0 | 12-3*01 | CAMKDFGNEKLTF | | | 2*01 | CSWDFQETQYF | 2265 |
| | | | | | | | | | | | | | 2508 |
| BB4 | Neo⁻WT⁺ | TEAD1- | 0 | 0 | 0 | 0 | 12-2*01 | CAVITGTALIF | | | 2*01 | CASSENTGELFF | 2266 |
| | | (SVL) | | | | | | | | | | | 2509 |
| BB5 | Neo⁻WT⁺ | GANAB | 0 | 0 | 0 | 0 | 12-2*01 | CAVNNARLMF | | | | | 2263 |
| BB9 | Neo⁻WT⁺ | FNDC3B | 0 | 0 | 0 | 0 | | | | | | | |
| BC3 | Neo⁻WT⁺ | FNDC3B | 0 | 0 | 0 | 0 | 14/DV4*01 | CAMREFNAGGTS | | | 20-1*01 | CSGLVPGFDSPL | 2267 |
| | | | | | | | | YGKLTF | | | | HF | 2510 |
| BC6 | Neo⁻WT⁺ | FNDC3B | 0 | 0 | 0 | 0 | 14/DV4*01 | CAMRETWGGLGG | 12- | CVVISTDSWGK | 9*01 | CASSVETGGLDT | 2268 |
| | | | | | | | | SQGNLIF | 1*01 | FQF | | QYF | 2309 |
| | | | | | | | | | | | | | 2375 |
| BC7 | Neo⁻WT⁺ | PGM5 | 0 | 0 | 0 | 0 | | | | | 9*01 | CASSVDGGPQET | 2511 |
| | | | | | | | | | | | | QYF | |
| BD4 | Neo⁻WT⁺ | FNDC3B | 0 | 0 | 0 | 0 | 12-2*01 | CAVYTGGFKTIF | | | 12- | CASSFGGSSYEQ | 2269 |
| | | | | | | | | | | | 3*01,12- | YF | 2512 |
| | | | | | | | | | | | 4*01 | | |
| BD6 | Neo⁻WT⁺ | WDR46 | 0 | 0 | 0 | 0 | 12-2*01 | CAVPVLGGSQGNL | | | | | 2270 |
| | | | | | | | | IF | | | | | |
| BD7 | Neo⁻WT⁺ | SEC24A | 0 | 0 | 0 | 0 | | | | | 9*01 | CASSVGTSSYGY | 2513 |
| | | | | | | | | | | | | TF | |
| BD9 | Neo⁻WT⁺ | MLL2 | 0 | 0 | 0 | 0 | 17*01 | CATDANTGNQFYF | | | 19*01 | CASSLGTLNEQF | 2271 |
| | | | | | | | | | | | | F | 2514 |
| BE11 | Neo⁻WT⁺ | SEC24A | 0 | 0 | 0 | 0 | 22*01 | CALLSNQAGTALIF | | | 28*01 | CASSNARGYGYT | 2272 |
| | | | | | | | | | | | | F | 2515 |
| BE2 | Neo⁻WT⁺ | USP28 | 0 | 0 | 0 | 0 | 8-3*01 | CAVGDAGGATNKL | | | 7-2*01 | CASSWWLNTEAF | 2273 |
| | | | | | | | | IF | | | | F | 2516 |
| BE4 | Neo⁻WT⁺ | GANAB | 0 | 0 | 0 | 0 | 12-2*01 | CAVNNARLMF | | | | | 2263 |
| BE6 | Neo⁻WT⁺ | SEC24A | 0 | 0 | 0 | 0 | | | | | 5-6*01 | CASSPAGSNYGY | 2517 |
| | | | | | | | | | | | | TF | |
| BE7 | Neo⁻WT⁺ | MRM1 | 0 | 0 | 0 | 0 | 9-2*01 | CALSEPIYNFNKFY | | | 11-2*01 | CASSLGAEQYF | 2274 |
| | | | | | | | | F | | | | | 2518 |
| BE8 | Neo⁻WT⁺ | SEC24A | 0 | 0 | 0 | 0 | 22*01 F | CAVEDLGFGNVLH | | | 28*01 | CASSPGLYTQYF | 2275 |
| | | | | | | | | C | | | | | 2519 |
| BF1 | Neo⁻WT⁺ | SEC24A | 0 | 0 | 0 | 0 | | | | | | | |
| BF10 | Neo⁻WT⁺ | GANAB | 0 | 0 | 0 | 0 | 12-2*01 | CAVNPGGFKTIF | | | 6-2*01,6- | CASSYSSGTEAF | 2276 |
| | | | | | | | | | | | 3*01 | F | 2520 |
| BF2 | Neo⁻WT⁺ | GANAB | 0 | 0 | 0 | 0 | 12-2*01 | CAVSPGGFKTIF | | | | | 2277 |
| BF4 | Neo⁻WT⁺ | SEC24A | 0 | 0 | 0 | 0 | 5*01 | CAERDQAGTALIF | 17*01 | CATDVYDYKLS | 7-2*01 | CASSLREAGELF | 2278 |
| | | | | | | | | | | F | | F | 2310 |
| | | | | | | | | | | | | | 2521 |
| BF6 | Neo⁻WT⁺ | SEC24A | 0 | 0 | 0 | 0 | 8-3*01 | CAVGYNTDKLIF | | | 7-6*01 | CASSLGNTEAFF | 2279 |
| | | | | | | | | | | | | | 2522 |
| BF7 | Neo⁻WT⁺ | FNDC3B | 0 | 0 | 0 | 0 | 1-2*01 | CAVRGSARQLTF | | | 2*01 | CASSEVQGGRDT | 2280 |
| | | | | | | | | | | | | QYF | 2523 |
| BF8 | Neo⁻WT⁺ | SEC24A | 0 | 0 | 0 | 0 | 12-3*01 | CAMDKMDSNYQLI | | | 27*01 | CASSFGIGPQYF | 2281 |
| | | | | | | | | W | | | | | 2524 |
| BG3 | Neo⁻WT⁺ | WDR46 | 0 | 0 | 0 | 0 | 14/DV4*01 | CAMRESKAAGNKL | | | 7-2*01 | CASSLWGQGWT | 2282 |
| | | | | | | | | TF | | | | GELFF | 2525 |
| BG4 | Neo⁻WT⁺ | COL18A1 | 0 | 0 | 0 | 0 | 23/DV6*01 | CAASLNTNAGKST | | | 30*01 | CAWSVGNYGYTF | 2283 |
| | | | | | | | | F | | | | | 2526 |
| BG6 | Neo⁻WT⁺ | FNDC3B | 0 | 0 | 0 | 0 | 14/DV4*01 | CAMRESSYGNNR | | | 5-8*01 | CASSRPLNQPQH | 2284 |
| | | | | | | | | LAF | | | | F | 2527 |
| BG8 | Neo⁻WT⁺ | WDR46 | 0 | 0 | 0 | 0 | 12-2*01 | CAVNMEGAGSYQ | | | 9*01 | CASSVESGEQYF | 2285 |
| | | | | | | | | LTF | | | | | 2528 |
| BH12 | Neo⁻WT⁺ | GANAB | 0 | 0 | 0 | 0 | 12-2*01 | CAVNNARLMF | | | | | 2263 |
| BH3 | Neo⁻WT⁺ | SNX24 | 0 | 0 | 0 | 0 | 13-2*01 | CAENKDDYKLSF | | | 7-8*01 | CASSFSATGELFF | 2286 |
| | | | | | | | | | | | | | 2529 |
| BH4 | Neo⁻WT⁺ | GANAB | 0 | 0 | 0 | 0 | 12-2*01 | CAVNNARLMF | | | | | 2263 |
| CB9 | Neo⁻WT⁺ | PGM5 | 0 | 0 | 0 | 0 | 35*01 | CAGAEISGGGADG | 9-2*01 | CAPPIEGGSEKL | 3-1*01 | CASSLAYEQYF | 2287 |
| | | | | | | | | LTF | | VF | | | 2311 |
| | | | | | | | | | | | | | 2530 |
| CC5 | Neo-WT⁺ | WDR46 | 0 | 0 | 0 | 0 | | | | | 4-1*01 | CASSFGANTGEL | 2531 |
| | | | | | | | | | | | | FF | |
| CC8 | Neo⁻WT⁺ | SEC24A | 0 | 0 | 0 | 0 | | | | | | | |
| CD6 | Neo⁻WT⁺ | GANAB | 0 | 0 | 0 | 0 | 12-2*01 | CAVNNARLMF | | | 4-3*01 | CASSQGGGGTD | 2263 |
| | | | | | | | | | | | | TQYF | 2505 |
| CH11 | Neo⁻WT⁺ | GANAB | 0 | 0 | 0 | 0 | 12-2*01 | CAVNNARLMF | | | 4-3*01 | CASSQGGGGTD | 2263 |
| | | | | | | | | | | | | TQYF | 2505 |
| CH4 | Neo⁻WT⁺ | SEC24A | 0 | 0 | 0 | 0 | 14/DV4*01 | CAMREFYSGGGA | | | 2*01 | CASSEDRGNSPL | 2288 |
| | | | | | | | | DGLTF | | | | HF | 2532 |
| CH5 | Neo⁻WT⁺ | GANAB | 0 | 0 | 0 | 0 | 12-2*01 | CAVNNARLMF | | | 4-3*01 | CASSQGGGGTD | 2263 |
| | | | | | | | | | | | | TQYF | 2505 |

TABLE 7
TetTCR summary for experiment 4.

| Cell | Sorted | Detected Peptide by MID Count | | | | | TCRα,1 | | TCRα,2 | | TCRβ | | SEQ ID NO |
|---|---|---|---|---|---|---|---|---|---|---|---|---|---|
| Name | Population | Rank 1 | Rank 2 | Rank 3 | Rank 4 | Rank 5 | TRAV | CDR3α | TRAV | CDR3α | TRBV | CDR3β | (L to R) |

| | | | | | | | | | | | | | |
|---|---|---|---|---|---|---|---|---|---|---|---|---|---|
| G23 | Neo⁺WT⁺ | 0 | 0 | 0 | 0 | 0 | | | | | | | |
| G6 | Neo⁺WT⁺ | 0 | 0 | 0 | 0 | 0 | | | | | 15*01 | CATSQMGDT | 2615 |
| | | | | | | | | | | | | QYF | |
| H10 | Neo⁺WT⁺ | 0 | 0 | 0 | 0 | 0 | 3*01 | CAVGFYGNN | | | | | 2533 |
| | | | | | | | | RLAF | | | | | |
| H9 | Neo⁺WT⁺ | 0 | 0 | 0 | 0 | 0 | | | | | 6-2*01, | CASSPFGDM | 2616 |
| | | | | | | | | | | | 6-3*01 | LYNEQFF | |
| I12 | Neo⁺WT⁺ | 0 | 0 | 0 | 0 | 0 | 12-2*01 | CAVRNNDMR | | | | | 2534 |
| | | | | | | | | F | | | | | |
| I15 | Neo⁺WT⁺ | 0 | 0 | 0 | 0 | 0 | | | | | 30*01 | CAARPASYE | 367 |
| | | | | | | | | | | | | QYF | |
| J5 | Neo⁺WT⁺ | 0 | 0 | 0 | 0 | 0 | | | | | 12-3*01, | CASSSSGRA | 2618 |
| | | | | | | | | | | | 12-4*01 | SADTQYF | |
| K5 | Neo⁺WT⁺ | 0 | 0 | 0 | 0 | 0 | | | | | | | |
| L13 | Neo⁺WT⁺ | 0 | 0 | 0 | 0 | 0 | | | | | | | |
| L6 | Neo⁺WT⁺ | 0 | 0 | 0 | 0 | 0 | 19*01 | CALSEALAY | | | | | 2535 |
| | | | | | | | | NQGGKLIF | | | | | |
| M3 | Neo⁺WT⁺ | 0 | 0 | 0 | 0 | 0 | 10*01 | CVVSGGYNK | | | 4-2*01 | CASSPNARLA | 2536 |
| | | | | | | | | LIF | | | | GAGGTDTQYF | 2619 |
| M7 | Neo⁺WT⁺ | 0 | 0 | 0 | 0 | 0 | | | | | 5-6*01 | CASSLAPKT | 2620 |
| | | | | | | | | | | | | AFSYEQYF | |
| O1 | Neo⁺WT⁺ | 0 | 0 | 0 | 0 | 0 | 14/DV4*01 | CAMRDPFTG | | | 20-1*01 | CSARSWTPQ | 2537 |
| | | | | | | | | NQFYF | | | | ETQYF | 2621 |
| H23 | Neo⁺WT⁺ | AKAP13 | 0 | 0 | 0 | 0 | | | | | | | |
| H4 | Neo⁺WT⁺ | AKAP13 | AKAP13_Q8K | 0 | 0 | 0 | | | | | | | |
| K2 | Neo⁺WT⁺ | AKAP13 | AKAP13_Q8K | SNX24 | 0 | 0 | | | | | 29-1*01 | CSVEGLRGG | 2622 |
| | | | | | | | | | | | | NEQFF | |
| G2 | Neo⁺WT⁺ | AKAP13_Q8K | AKAP13 | 0 | 0 | 0 | | | | | | | |
| I1 | Neo⁺WT⁺ | COL18A1 | COL18A1_S8F | 0 | 0 | 0 | 16*01 | CALRGYSTL | | | | | 2538 |
| | | | | | | | | TF | | | | | |
| K12 | Neo⁺WT⁺ | COL18A1 | COL18A1_S8F | 0 | 0 | 0 | | | | | | | |
| G12 | Neo⁺WT⁺ | FNDC3B | FNDC3B_L3M | 0 | 0 | 0 | | | | | | | |
| G14 | Neo⁺WT⁺ | FNDC3B | FNDC3B_L3M | 0 | 0 | 0 | 14/DV4*01 | CAMRELGGS | | | | | 2539 |
| | | | | | | | | NYKLTF | | | | | |
| G18 | Neo⁺WT⁺ | FNDC3B | FNDC3B_L3M | 0 | 0 | 0 | | | | | 13*01 | CASSLGGLT | 2623 |
| | | | | | | | | | | | | DTQYF | |
| G19 | Neo⁺WT⁺ | FNDC3B | FNDC3B_L3M | 0 | 0 | 0 | | | | | | | |
| G24 | Neo⁺WT⁺ | FNDC3B | FNDC3B_L3M | 0 | 0 | 0 | | | | | | | |
| G3 | Neo⁺WT⁺ | FNDC3B | 0 | 0 | 0 | 0 | | | | | 30*01 | CAWSAGEQY | 2624 |
| | | | | | | | | | | | | F | |
| G7 | Neo⁺WT⁺ | FNDC3B | USP28_C5F | 0 | 0 | 0 | 19*01 | CALSETDTG | | | | | 2540 |
| | | | | | | | | RRALTF | | | | | |
| H11 | Neo⁺WT⁺ | FNDC3B | FNDC3B_L3M | 0 | 0 | 0 | | | | | | | |
| H2 | Neo⁺WT⁺ | FNDC3B | FNDC3B_L3M | 0 | 0 | 0 | | | | | | | |
| H8 | Neo⁺WT⁺ | FNDC3B | FNDC3B_L3M | 0 | 0 | 0 | | | | | | | |
| I13 | Neo⁺WT⁺ | FNDC3B | FNDC3B_L3M | 0 | 0 | 0 | | | | | | | |
| I14 | Neo⁺WT⁺ | FNDC3B | FNDC3B_L3M | 0 | 0 | 0 | 14/DV4*01 | CAMREFAGA | | | | | 2541 |
| | | | | | | | | NSKLTF | | | | | |
| I18 | Neo⁺WT⁺ | FNDC3B | FNDC3B_L3M | 0 | 0 | 0 | | | | | 6-5*01 | CASSYGGGS | 2625 |
| | | | | | | | | | | | | PQYF | |
| I20 | Neo⁺WT⁺ | FNDC3B | FNDC3B_L3M | 0 | 0 | 0 | | | | | | | |
| I6 | Neo⁺WT⁺ | FNDC3B | FNDC3B_L3M | 0 | 0 | 0 | 12-2*01 | CAVNNARLM | | | | | 2542 |
| | | | | | | | | F | | | | | |
| J1 | Neo⁺WT⁺ | FNDC3B | FNDC3B_L3M | 0 | 0 | 0 | | | | | 5-4*01 | CASSWTGN | 2626 |
| | | | | | | | | | | | | TEAFF | |
| J12 | Neo⁺WT⁺ | FNDC3B | FNDC3B_L3M | 0 | 0 | 0 | | | | | | | |
| J17 | Neo⁺WT⁺ | FNDC3B | FNDC3B_L3M | 0 | 0 | 0 | | | | | | | |
| K19 | Neo⁺WT⁺ | FNDC3B | FNDC3B_L3M | 0 | 0 | 0 | | | | | | | |
| K3 | Neo⁺WT⁺ | FNDC3B | FNDC3B_L3M | 0 | 0 | 0 | | | | | | | |
| L1 | Neo⁺WT⁺ | FNDC3B | FNDC3B_L3M | 0 | 0 | 0 | 29/DV5*01 | CAASGQGGT | | | | | 2543 |
| | | | | | | | | SYGKLTF | | | | | |
| L11 | Neo⁺WT⁺ | FNDC3B | FNDC3B_L3M | 0 | 0 | 0 | 29/DV5*01 | CAASGGNSG | | | 13*01 | CASSPLRGPY | 2544 |
| | | | | | | | | YALNF | | | | EQYF | 2627 |
| L2 | Neo⁺WT⁺ | FNDC3B | FNDC3B_L3M | 0 | 0 | 0 | | | | | | | |
| M2 | Neo⁺WT⁺ | FNDC3B | FNDC3B_L3M | 0 | 0 | 0 | | | | | 20-1*01 | CSATPRYRG | 2628 |
| | | | | | | | | | | | | YEQYF | |
| M4 | Neo⁺WT⁺ | FNDC3B | FNDC3B_L3M | 0 | 0 | 0 | 12-1*01 | CVVRGSQGN | | | | | 2545 |
| | | | | | | | | LIF | | | | | |
| N8 | Neo⁺WT⁺ | FNDC3B | FNDC3B_L3M | 0 | 0 | 0 | | | | | | | |
| K1 | Neo⁺WT⁺ | FNDC3B_L3M | TEAD1_L8F | FNDC3B | TEAD1_(VLE) | 0 | | | | | 3-1*01 | CASAGPGRN | 2629 |
| | | | | | | | | | | | | QPQHF | |
| M11 | Neo⁺WT⁺ | GANAB | GANAB_S5F | 0 | 0 | 0 | 29/DV5*01 | CAASALSGA | | | 4-2*01 | CASSQGSGAN | 2546 |
| | | | | | | | | NSKLTF | | | | VLTF | 2630 |
| G17 | Neo⁺WT⁺ | MLL2 | MLL2_L8H | 0 | 0 | 0 | | | | | | | |
| G9 | Neo⁺WT⁺ | MLL2 | 0 | 0 | 0 | 0 | | | | | 7-9*01 | CASYPISRA | 2631 |
| | | | | | | | | | | | | SYEQYF | |
| H12 | Neo⁺WT⁺ | MLL2 | MLL2_L8H | 0 | 0 | 0 | | | | | | | |
| N2 | Neo⁺WT⁺ | MLL2 | MLL2_L8H | 0 | 0 | 0 | | | | | | | |
| G20 | Neo⁺WT⁺ | MRM1 | NSDHL | NSDHL_A9V | USP28 | 0 | | | | | | | |
| J20 | Neo⁺WT⁺ | MRM1 | NSDHL | NSDHL_A9V | 0 | 0 | | | | | 4-1*01 | CASSQDQNT | 2632 |
| | | | | | | | | | | | | EAFF | |
| H1 | Neo⁺WT⁺ | NSDHL | NSDHL_A9V | MRM1 | 0 | 0 | | | | | | | |
| H16 | Neo⁺WT⁺ | NSDHL | NSDHL_A9V | 0 | 0 | 0 | | | | | | | |
| H20 | Neo⁺WT⁺ | NSDHL | NSDHL_A9V | 0 | 0 | 0 | | | | | | | |
| H3 | Neo⁺WT⁺ | NSDHL | NSDHL_A9V | 0 | 0 | 0 | | | | | 7-9*01 | CASSGQGHP | 2633 |
| | | | | | | | | | | | | YNEQFF | |
| H7 | Neo⁺WT⁺ | NSDHL | NSDHL_A9V | 0 | 0 | 0 | | | | | | | |
| I16 | Neo⁺WT⁺ | NSDHL | NSDHL_A9V | 0 | 0 | 0 | | | | | | | |
| I17 | Neo⁺WT⁺ | NSDHL | NSDHL_A9V | 0 | 0 | 0 | | | | | | | |
| I19 | Neo⁺WT⁺ | NSDHL | NSDHL_A9V | 0 | 0 | 0 | | | | | | | |
| I2 | Neo⁺WT⁺ | NSDHL | NSDHL_A9V | 0 | 0 | 0 | | | | | | | |
| I22 | Neo⁺WT⁺ | NSDHL | NSDHL_A9V | 0 | 0 | 0 | | | | | | | |
| I24 | Neo⁺WT⁺ | NSDHL | NSDHL_A9V | 0 | 0 | 0 | | | | | | | |
| I3 | Neo⁺WT⁺ | NSDHL | NSDHL_A9V | 0 | 0 | 0 | 3*01 | CAVRETNPK | | | | | 2547 |
| | | | | | | | | GKLIF | | | | | |
| I5 | Neo⁺WT⁺ | NSDHL | NSDHL_A9V | 0 | 0 | 0 | | | | | | | |
| J10 | Neo⁺WT⁺ | NSDHL | NSDHL_A9V | 0 | 0 | 0 | | | | | | | |
| J21 | Neo⁺WT⁺ | NSDHL | NSDHL_A9V | 0 | 0 | 0 | | | | | | | |
| J24 | Neo⁺WT⁺ | NSDHL | NSDHL_A9V | 0 | 0 | 0 | | | | | | | |
| J8 | Neo⁺WT⁺ | NSDHL | NSDHL_A9V | 0 | 0 | 0 | 9-2*01 | CALSEVNRD | | | 7-9*01 | CASSPMGQSY | 2548 |
| | | | | | | | | DKIIF | | | | EQYF | 2634 |
| J9 | Neo⁺WT⁺ | NSDHL | NSDHL_A9V | 0 | 0 | 0 | | | | | | | |
| K10 | Neo⁺WT⁺ | NSDHL | NSDHL_A9V | 0 | 0 | 0 | | | | | | | |
| K11 | Neo⁺WT⁺ | NSDHL | NSDHL_A9V | 0 | 0 | 0 | 14/DV4*01 | CAMRELDGQ | | | 9*01 | CASSTGGTSG | 2549 |
| | | | | | | | | KLLF | | | | GRNTGELFF | 2635 |
| K13 | Neo⁺WT⁺ | NSDHL | NSDHL_A9V | 0 | 0 | 0 | | | | | | | |
| K17 | Neo⁺WT⁺ | NSDHL | NSDHL_A9V | 0 | 0 | 0 | | | | | | | |
| K4 | Neo⁺WT⁺ | NSDHL | NSDHL_A9V | 0 | 0 | 0 | | | | | | | |
| L15 | Neo⁺WT⁺ | NSDHL | NSDHL_A9V | 0 | 0 | 0 | | | | | | | |
| L5 | Neo⁺WT⁺ | NSDHL | NSDHL_A9V | 0 | 0 | 0 | | | | | | | |
| L8 | Neo⁺WT⁺ | NSDHL | NSDHL_A9V | 0 | 0 | 0 | | | | | 20-1*01 | CSARGDPNY | 2636 |
| | | | | | | | | | | | | EQYF | |
| M1 | Neo⁺WT⁺ | NSDHL | NSDHL_A9V | 0 | 0 | 0 | | | | | | | |
| M10 | Neo⁺WT⁺ | NSDHL | NSDHL_A9V | 0 | 0 | 0 | 19*01 | CALSEANYG | | | 4-1*01 | CASSPRAYNE | 2550 |
| | | | | | | | | GSQGNLIF | | | | QFF | 2637 |
| N1 | Neo⁺WT⁺ | NSDHL | NSDHL_A9V | 0 | 0 | 0 | 1-2*01 | CAVRGLTGA | | | | | 2551 |
| | | | | | | | | NNLFF | | | | | |
| G22 | Neo⁺WT⁺ | NSDHL_A9V | NSDHL | 0 | 0 | 0 | 38-1*01 | CAFMMDNNN | | | 9*01 | CASSGQGGDE | 2552 |
| | | | | | | | | DMRF | | | | QYF | 2638 |
| H14 | Neo⁺WT⁺ | NSDHL_A9V | NSDHL | 0 | 0 | 0 | 10*01 | CVVTPTDSW | | | | | 2553 |
| | | | | | | | | GKLQF | | | | | |
| H17 | Neo⁺WT⁺ | NSDHL_A9V | NSDHL | 0 | 0 | 0 | 9-2*01 | CALSEGQTG | | | 9*01 | CASSVGGGSS | 2554 |
| | | | | | | | | ANNLFF | | | | YEQYF | 2639 |
| H6 | Neo⁺WT⁺ | NSDHL_A9V | NSDHL | 0 | 0 | 0 | | | | | | | |
| I7 | Neo⁺WT⁺ | NSDHL_A9V | NSDHL | 0 | 0 | 0 | | | | | | | |
| I8 | Neo⁺WT⁺ | NSDHL_A9V | NSDHL | 0 | 0 | 0 | 5*01 | CAESRPEYG | | | | | 2555 |
| | | | | | | | | NKLVF | | | | | |
| I9 | Neo⁺WT⁺ | NSDHL_A9V | NSDHL | 0 | 0 | 0 | 14/DV4*01 | CAMRAYSGG | | | 9*01 | CASSVASGGY | 2556 |
| | | | | | | | | GADGLTF | | | | TDTQYF | 2640 |
| J13 | Neo⁺WT⁺ | NSDHL_A9V | NSDHL | 0 | 0 | 0 | | | | | | | |
| J19 | Neo⁺WT⁺ | NSDHL_A9V | NSDHL | 0 | 0 | 0 | | | | | | | |
| J23 | Neo⁺WT⁺ | NSDHL_A9V | NSDHL | 0 | 0 | 0 | 24*01 | CAPPGAQKL | | | | | 2557 |
| | | | | | | | | VF | | | | | |
| K15 | Neo⁺WT⁺ | NSDHL_A9V | NSDHL | 0 | 0 | 0 | 12-3*01 | CAMTITGNQ | | | | | 2558 |
| | | | | | | | | FYF | | | | | |
| N3 | Neo⁺WT⁺ | NSDHL_A9V | NSDHL | 0 | 0 | 0 | | | | | | | |
| N7 | Neo⁺WT⁺ | NSDHL_A9V | NSDHL | 0 | 0 | 0 | | | | | 28*01 | CASSRSRWE | 2641 |
| | | | | | | | | | | | | FYGYTF | |
| O2 | Neo⁺WT⁺ | NSDHL_A9V | NSDHL | 0 | 0 | 0 | 19*01 | CALSEAGSG | | | 9*01 | CASNRGYNEQ | 2559 |
| | | | | | | | | NTPLVF | | | | FF | 2642 |
| I11 | Neo⁺WT⁺ | PGM5 | PGM5_H5Y | 0 | 0 | 0 | 16*01 | CALIRNSGN | | | | | 2560 |
| | | | | | | | | TPLVF | | | | | |
| J16 | Neo⁺WT⁺ | PGM5 | PGM5_H5Y | 0 | 0 | 0 | | | | | | | |
| K8 | Neo⁺WT⁺ | PGM5 | PGM5_H5Y | 0 | 0 | 0 | 17*01 | CATEDYNTD | | | | | 2561 |
| | | | | | | | | KLIF | | | | | |
| I23 | Neo⁺WT⁺ | PGM5_H5Y | PGM5 | 0 | 0 | 0 | | | | | | | |
| G15 | Neo⁺WT⁺ | SEC24A | SEC24A_P5L | 0 | 0 | 0 | | | | | 4-3*01 | CASSQAERG | 2643 |
| | | | | | | | | | | | | ESYNEQFF | |
| G16 | Neo⁺WT⁺ | SMARCD3 | SMARCD3_H8Y | 0 | 0 | 0 | | | | | | | |
| J4 | Neo⁺WT⁺ | SMARCD3 | SMARCD3_H8Y | 0 | 0 | 0 | | | | | 27*01 | CASSLGGNP | 2644 |
| | | | | | | | | | | | | TYNEQFF | |
| L12 | Neo⁺WT⁺ | SMARCD3 | SMARCD3_H8Y | 0 | 0 | 0 | | | | | | | |
| H24 | Neo⁺WT⁺ | SNX24 | SNX24_P6L | 0 | 0 | 0 | | | | | | | |
| O4 | Neo⁺WT⁺ | TEAD1_(SVL) | TEAD1_L9F | 0 | 0 | 0 | | | | | 2*01 | CASRIPDRN | 2645 |
| | | | | | | | | | | | | EQFF | |
| H5 | Neo⁺WT⁺ | TEAD1_(VLE) | MAGEA12_KMAE | 0 | 0 | 0 | | | | | | | |
| G21 | Neo⁺WT⁺ | WDR46 | WDR46_T3I | 0 | 0 | 0 | 14/DV4*01 | CAMRELNFN | | | | | 2562 |
| | | | | | | | | KFYF | | | | | |
| A5 | Neo⁺WT⁻ | AKAP13_Q8K | 0 | 0 | 0 | 0 | | | | | 30*01 | CAWSAGGTG | 2646 |
| | | | | | | | | | | | | ELFF | |
| B10 | Neo⁺WT⁻ | AKAP13_Q8K | 0 | 0 | 0 | 0 | | | | | | | |
| B14 | Neo⁺WT⁻ | AKAP13_Q8K | 0 | 0 | 0 | 0 | 38-2/DV8*01 | CAYHDNNDM | | | | | 2563 |
| | | | | | | | | RF | | | | | |
| D13 | Neo⁺WT⁻ | AKAP13_Q8K | 0 | 0 | 0 | 0 | | | | | 30*01 | CAWMGSYNE | 2647 |
| | | | | | | | | | | | | QFF | |
| E4 | Neo⁺WT⁻ | AKAP13_Q8K | 0 | 0 | 0 | 0 | 29/DV5*01 | CAASAMDSS | | | | | 2564 |
| | | | | | | | | YKLIF | | | | | |
| F11 | Neo⁺WT⁻ | AKAP13_Q8K | 0 | 0 | 0 | 0 | | | | | | | |
| F19 | Neo⁺WT⁻ | AKAP13_Q8K | 0 | 0 | 0 | 0 | | | | | | | |
| E6 | Neo⁺WT⁻ | ERBB2_H8Y | 0 | 0 | 0 | 0 | | | | | | | |
| E12 | Neo⁺WT⁻ | FNDC3B_L3M | 0 | 0 | 0 | 0 | | | | | 7-6*01 | CASSLQGSY | 2648 |
| | | | | | | | | | | | | EQYF | |
| A18 | Neo⁺WT⁻ | GANAB_S5F | 0 | 0 | 0 | 0 | | | | | | | |
| A21 | Neo⁺WT⁻ | GANAB_S5F | 0 | 0 | 0 | 0 | | | | | | | |
| A6 | Neo⁺WT⁻ | GANAB_S5F | 0 | 0 | 0 | 0 | 19*01 | CALSEAEYN | | | 20-1*01 | CSARPGLAGG | 2565 |
| | | | | | | | | FNKFYF | | | | YEQYF | 2649 |
| A9 | Neo⁺WT⁻ | GANAB_S5F | 0 | 0 | 0 | 0 | | | | | 6-5*01 | CASSYQTGN | 2650 |
| | | | | | | | | | | | | EQFF | |
| B24 | Neo⁺WT⁻ | GANAB_S5F | 0 | 0 | 0 | 0 | 35*01 | CAGQSRYNR | | | | | 2566 |
| | | | | | | | | DDKIIF | | | | | |
| B4 | Neo⁺WT⁻ | GANAB_S5F | 0 | 0 | 0 | 0 | 12-2*01 | CAAAAGANN | | | | | 2567 |
| | | | | | | | | LFF | | | | | |
| B5 | Neo⁺WT⁻ | GANAB_S5F | 0 | 0 | 0 | 0 | 25*01 | CAGGSNDYK | | | | | 2568 |
| | | | | | | | | LSF | | | | | |
| B8 | Neo⁺WT⁻ | GANAB_S5F | 0 | 0 | 0 | 0 | 1-1*01 | CAVSFYNQG | | | 19*01 | CASRGSGAST | 2569 |
| | | | | | | | | GKLIF | | | | GELFF | 2651 |
| B9 | Neo⁺WT⁻ | GANAB_S5F | 0 | 0 | 0 | 0 | | | | | | | |
| C10 | Neo⁺WT⁻ | GANAB_S5F | 0 | 0 | 0 | 0 | | | | | | | |
| C11 | Neo⁺WT⁻ | GANAB_S5F | 0 | 0 | 0 | 0 | | | | | | | |
| C2 | Neo⁺WT⁻ | GANAB_S5F | 0 | 0 | 0 | 0 | | | | | | | |
| C22 | Neo⁺WT⁻ | GANAB_S5F | 0 | 0 | 0 | 0 | | | | | 9*01 | CASSGQGTD | 2652 |
| | | | | | | | | | | | | TQYF | |
| C3 | Neo⁺WT⁻ | GANAB_S5F | 0 | 0 | 0 | 0 | | | | | | | |
| C5 | Neo⁺WT⁻ | GANAB_S5F | 0 | 0 | 0 | 0 | | | | | 7-9*01 | CASSLWAEP | 2653 |
| | | | | | | | | | | | | DTQYF | |
| C6 | Neo⁺WT⁻ | GANAB_S5F | 0 | 0 | 0 | 0 | | | | | | | |
| D14 | Neo⁺WT⁻ | GANAB_S5F | 0 | 0 | 0 | 0 | | | | | | | |
| D19 | Neo⁺WT⁻ | GANAB_S5F | 0 | 0 | 0 | 0 | | | | | | | |
| D2 | Neo⁺WT⁻ | GANAB_S5F | 0 | 0 | 0 | 0 | | | | | | | |
| D4 | Neo⁺WT⁻ | GANAB_S5F | 0 | 0 | 0 | 0 | | | | | | | |
| E16 | Neo⁺WT⁻ | GANAB_S5F | 0 | 0 | 0 | 0 | | | | | | | |
| E8 | Neo⁺WT⁻ | GANAB_S5F | 0 | 0 | 0 | 0 | 8-1*01 | CAVNAPDTD | | | | | 2570 |
| | | | | | | | | KLIF | | | | | |
| E9 | Neo⁺WT⁻ | GANAB_S5F | 0 | 0 | 0 | 0 | 39*01 | CAVVNSNSG | | | | | 2571 |
| | | | | | | | | YALNF | | | | | |
| F13 | Neo⁺WT⁻ | GANAB_S5F | 0 | 0 | 0 | 0 | | | | | | | |
| F17 | Neo⁺WT⁻ | GANAB_S5F | 0 | 0 | 0 | 0 | | | | | | | |
| B22 | Neo⁺WT⁻ | GCN1L1_L6P | 0 | 0 | 0 | 0 | | | | | | | |
| A1 | Neo⁺WT⁻ | GNL3L_R4C | 0 | 0 | 0 | 0 | | | | | | | |
| A11 | Neo⁺WT⁻ | GNL3L_R4C | 0 | 0 | 0 | 0 | | | | | | | |
| A13 | Neo⁺WT⁻ | GNL3L_R4C | 0 | 0 | 0 | 0 | | | | | | | |
| A15 | Neo⁺WT⁻ | GNL3L_R4C | 0 | 0 | 0 | 0 | | | | | | | |
| A16 | Neo⁺WT⁻ | GNL3L_R4C | 0 | 0 | 0 | 0 | 21*01 | CAVLLNNAG | | | | | 2572 |
| | | | | | | | | NMLTF | | | | | |
| A17 | Neo⁺WT⁻ | GNL3L_R4C | 0 | 0 | 0 | 0 | | | | | 6-5*01 | CASSLGISY | 2654 |
| | | | | | | | | | | | | EQYF | |
| A2 | Neo⁺WT⁻ | GNL3L_R4C | 0 | 0 | 0 | 0 | | | | | 4-3*01 | CASSQVTGY | 2655 |
| | | | | | | | | | | | | EQYF | |
| A20 | Neo⁺WT⁻ | GNL3L_R4C | 0 | 0 | 0 | 0 | | | | | | | |
| A23 | Neo⁺WT⁻ | GNL3L_R4C | 0 | 0 | 0 | 0 | | | | | | | |
| A3 | Neo⁺WT⁻ | GNL3L_R4C | 0 | 0 | 0 | 0 | 20*01 | CAVSGGYRD | | | 4-1*01 | CASSQVSGGS | 2573 |
| | | | | | | | | DKIIF | | | | YEQYF | 2656 |
| A4 | Neo⁺WT⁻ | GNL3L_R4C | 0 | 0 | 0 | 0 | 26-1*01 | CIVRDWANF | 13-1*01 | CAASIDRDDK | | | 2574 |
| | | | | | | | | GNEKLTF | | IIF | | | 2613 |
| B13 | Neo⁺WT⁻ | GNL3L_R4C | 0 | 0 | 0 | 0 | | | | | | | |
| B16 | Neo⁺WT⁻ | GNL3L_R4C | 0 | 0 | 0 | 0 | | | | | | | |
| B17 | Neo⁺WT⁻ | GNL3L_R4C | 0 | 0 | 0 | 0 | 26-2*01 | CILTMGTSY | | | 4-3*01 | CASSQEPSGF | 2575 |
| | | | | | | | | DKVIF | | | | YEQYF | 2657 |
| B18 | Neo⁺WT⁻ | GNL3L_R4C | 0 | 0 | 0 | 0 | 12-2*01 | CAVNEATGR | | | | | 2576 |
| | | | | | | | | RALTF | | | | | |
| B19 | Neo⁺WT⁻ | GNL3L_R4C | 0 | 0 | 0 | 0 | 22*01 | CAVDPNTGN | | | 4-2*01 | CASSQQGSEQ | 2577 |
| | | | | | | | | QFYF | | | | YF | 2658 |
| B2 | Neo⁺WT⁻ | GNL3L_R4C | 0 | 0 | 0 | 0 | | | | | | | |
| B20 | Neo⁺WT⁻ | GNL3L_R4C | 0 | 0 | 0 | 0 | | | | | | | |
| B21 | Neo⁺WT⁻ | GNL3L_R4C | 0 | 0 | 0 | 0 | | | | | 7-6*01 | CASSLGEDY | 2659 |
| | | | | | | | | | | | | EQYF | |
| B23 | Neo⁺WT⁻ | GNL3L_R4C | 0 | 0 | 0 | 0 | | | | | | | |
| B6 | Neo⁺WT⁻ | GNL3L_R4C | 0 | 0 | 0 | 0 | | | | | | | |
| C12 | Neo⁺WT⁻ | GNL3L_R4C | 0 | 0 | 0 | 0 | | | | | | | |
| C13 | Neo⁺WT⁻ | GNL3L_R4C | 0 | 0 | 0 | 0 | | | | | | | |
| C14 | Neo⁺WT⁻ | GNL3L_R4C | 0 | 0 | 0 | 0 | | | | | 29-1*01 | CSVQGPYNE | 2660 |
| | | | | | | | | | | | | QFF | |
| C16 | Neo⁺WT⁻ | GNL3L_R4C | 0 | 0 | 0 | 0 | | | | | | | |
| C19 | Neo⁺WT⁻ | GNL3L_R4C | 0 | 0 | 0 | 0 | 39*01 | CAADTSGTY | | | | | 2578 |
| | | | | | | | | KYIF | | | | | |
| C21 | Neo⁺WT⁻ | GNL3L_R4C | 0 | 0 | 0 | 0 | | | | | | | |
| C24 | Neo⁺WT⁻ | GNL3L_R4C | 0 | 0 | 0 | 0 | 13-1*01 | CAATRDYKL | | | | | 2579 |
| | | | | | | | | SF | | | | | |
| C4 | Neo⁺WT⁻ | GNL3L_R4C | 0 | 0 | 0 | 0 | | | | | | | |
| C9 | Neo⁺WT⁻ | GNL3L_R4C | 0 | 0 | 0 | 0 | 19*01 | CALAGWEYG | | | 4-3*01 | CASSPGQGID | 2580 |
| | | | | | | | | NKLVF | | | | SPLHF | 2661 |
| D12 | Neo⁺WT⁻ | GNL3L_R4C | 0 | 0 | 0 | 0 | | | | | | | |
| D15 | Neo⁺WT⁻ | GNL3L_R4C | 0 | 0 | 0 | 0 | | | | | | | |
| D16 | Neo⁺WT⁻ | GNL3L_R4C | 0 | 0 | 0 | 0 | | | | | | | |
| D18 | Neo⁺WT⁻ | GNL3L_R4C | 0 | 0 | 0 | 0 | | | | | | | |
| D21 | Neo⁺WT⁻ | GNL3L_R4C | 0 | 0 | 0 | 0 | | | | | | | |
| D23 | Neo⁺WT⁻ | GNL3L_R4C | 0 | 0 | 0 | 0 | 12-1*01 | CVVNINSGN | | | | | 2581 |
| | | | | | | | | TPLVF | | | | | |
| D24 | Neo⁺WT⁻ | GNL3L_R4C | 0 | 0 | 0 | 0 | | | | | | | |
| D3 | Neo⁺WT⁻ | GNL3L_R4C | 0 | 0 | 0 | 0 | | | | | | | |
| D5 | Neo⁺WT⁻ | GNL3L_R4C | 0 | 0 | 0 | 0 | 13-1*01 | CAAEGNTGG | | | | | 2582 |
| | | | | | | | | FKTIF | | | | | |
| D6 | Neo⁺WT⁻ | GNL3L_R4C | 0 | 0 | 0 | 0 | | | | | | | |
| D8 | Neo⁺WT⁻ | GNL3L_R4C | 0 | 0 | 0 | 0 | | | | | 6-5*01 | CASSYSGGY | 2662 |
| | | | | | | | | | | | | EQYF | |
| E10 | Neo⁺WT⁻ | GNL3L_R4C | 0 | 0 | 0 | 0 | | | | | | | |
| E15 | Neo⁺WT⁻ | GNL3L_R4C | 0 | 0 | 0 | 0 | | | | | | | |
| E17 | Neo⁺WT⁻ | GNL3L_R4C | 0 | 0 | 0 | 0 | | | | | | | |
| E18 | Neo⁺WT⁻ | GNL3L_R4C | 0 | 0 | 0 | 0 | | | | | | | |
| E21 | Neo⁺WT⁻ | GNL3L_R4C | 0 | 0 | 0 | 0 | | | | | | | |
| E22 | Neo⁺WT⁻ | GNL3L_R4C | 0 | 0 | 0 | 0 | | | | | 30*01 | CAWIRTGGY | 2663 |
| | | | | | | | | | | | | GYTF | |
| E23 | Neo⁺WT⁻ | GNL3L_R4C | 0 | 0 | 0 | 0 | | | | | | | |
| E7 | Neo⁺WT⁻ | GNL3L_R4C | 0 | 0 | 0 | 0 | | | | | | | |
| F1 | Neo⁺WT⁻ | GNL3L_R4C | 0 | 0 | 0 | 0 | | | | | | | |
| F10 | Neo⁺WT⁻ | GNL3L_R4C | 0 | 0 | 0 | 0 | | | | | | | |
| F12 | Neo⁺WT⁻ | GNL3L_R4C | 0 | 0 | 0 | 0 | | | | | | | |
| F14 | Neo⁺WT⁻ | GNL3L_R4C | 0 | 0 | 0 | 0 | | | | | | | |
| F16 | Neo⁺WT⁻ | GNL3L_R4C | 0 | 0 | 0 | 0 | | | | | | | |
| F18 | Neo⁺WT⁻ | GNL3L_R4C | 0 | 0 | 0 | 0 | | | | | | | |
| F2 | Neo⁺WT⁻ | GNL3L_R4C | 0 | 0 | 0 | 0 | | | | | | | |
| F20 | Neo⁺WT⁻ | GNL3L_R4C | 0 | 0 | 0 | 0 | | | | | | | |
| F21 | Neo⁺WT⁻ | GNL3L_R4C | 0 | 0 | 0 | 0 | 38-2/DV8*01F | CAAETSGSR | | | | | 2583 |
| | | | | | | | | LTF | | | | | |
| F22 | Neo⁺WT⁻ | GNL3L_R4C | 0 | 0 | 0 | 0 | 12-2*01 | CAVIDGAGS | | | | | 2584 |
| | | | | | | | | YQLTF | | | | | |
| F4 | Neo⁺WT⁻ | GNL3L_R4C | 0 | 0 | 0 | 0 | 12-2*01 | CAVFSGGYQ | | | 12-3*01, | CASSPGGGYE | 2585 |
| | | | | | | | | KVTF | | | 12-4*01 | QYF | 2664 |
| F6 | Neo⁺WT⁻ | GNL3L_R4C | 0 | 0 | 0 | 0 | | | | | | | |
| A12 | Neo⁺WT⁻ | MAGEA6_KVAK | 0 | 0 | 0 | 0 | | | | | | | |
| A19 | Neo⁺WT⁻ | MAGEA6_KVAK | 0 | 0 | 0 | 0 | | | | | | | |
| A10 | Neo⁺WT⁻ | MLL2_L8H | 0 | 0 | 0 | 0 | 9-2*01 | CALRLSSGG | | | 2*01 | CASSFTVAGE | 2566 |
| | | | | | | | | SNYKLTF | | | | QYF | 2665 |
| A24 | Neo⁺WT⁻ | MLL2_L8H | 0 | 0 | 0 | 0 | | | | | 6-6*01 | CASSYSGHN | 2666 |
| | | | | | | | | | | | | EQFF | |
| A7 | Neo⁺WT⁻ | MLL2_L8H | 0 | 0 | 0 | 0 | | | | | 4-1*01 | CASSYTIGN | 2667 |
| | | | | | | | | | | | | EQYF | |
| B1 | Neo⁺WT⁻ | MLL2_L8H | 0 | 0 | 0 | 0 | | | | | 10-3*01 | CAISDPDRG | 2668 |
| | | | | | | | | | | | | GRAFF | |
| C8 | Neo⁺WT⁻ | MLL2_L8H | 0 | 0 | 0 | 0 | | | | | | | |
| D11 | Neo⁺WT⁻ | MLL2_L8H | 0 | 0 | 0 | 0 | | | | | | | |
| D22 | Neo⁺WT⁻ | MLL2_L8H | 0 | 0 | 0 | 0 | 13-1*01 | CAAERGNNA | | | | | 2587 |
| | | | | | | | | RLMF | | | | | |
| E13 | Neo⁺WT⁻ | MLL2_L8H | 0 | 0 | 0 | 0 | | | | | | | |
| E19 | Neo⁺WT⁻ | MLL2_L8H | 0 | 0 | 0 | 0 | | | | | | | |
| F5 | Neo⁺WT⁻ | MLL2_L8H | 0 | 0 | 0 | 0 | | | | | | | |
| F3 | Neo⁺WT⁻ | NSDHL_A9V | 0 | 0 | 0 | 0 | 12-2*01 | CAVNPLEGG | | | | | 2588 |
| | | | | | | | | YNKLIF | | | | | |
| D20 | Neo⁺WT⁻ | PGM5_H5Y | 0 | 0 | 0 | 0 | | | | | | | |
| D9 | Neo⁺WT⁻ | PGM5_H5Y | 0 | 0 | 0 | 0 | | | | | | | |
| A14 | Neo⁺WT⁻ | SEC24A_P5L | 0 | 0 | 0 | 0 | | | | | 6-5*01 | CASTAGGGT | 2669 |
| | | | | | | | | | | | | DTQYF | |
| A22 | Neo⁺WT⁻ | SEC24A_P5L | 0 | 0 | 0 | 0 | | | | | 6-5*01 | CASSYSPGA | 2670 |
| | | | | | | | | | | | | YTEAFF | |
| A8 | Neo⁺WT⁻ | SEC24A_P5L | 0 | 0 | 0 | 0 | | | | | 29-1*01 | CSVWKENAF | 2671 |
| | | | | | | | | | | | | EQFF | |
| B11 | Neo⁺WT⁻ | SEC24A_P5L | 0 | 0 | 0 | 0 | | | | | | | |
| B15 | Neo⁺WT⁻ | SEC24A_P5L | 0 | 0 | 0 | 0 | | | | | | | |
| C1 | Neo⁺WT⁻ | SEC24A_P5L | 0 | 0 | 0 | 0 | | | | | | | |
| C15 | Neo⁺WT⁻ | SEC24A_P5L | 0 | 0 | 0 | 0 | | | | | | | |
| C17 | Neo⁺WT⁻ | SEC24A_P5L | 0 | 0 | 0 | 0 | | | | | | | |
| C23 | Neo⁺WT⁻ | SEC24A_P5L | 0 | 0 | 0 | 0 | 17*01 | CATDRNAPY | | | 4-3*01 | CASSQDTGYE | 2589 |
| | | | | | | | | ALNF | | | | QYF | 2672 |
| C7 | Neo⁺WT⁻ | SEC24A_P5L | 0 | 0 | 0 | 0 | 17*01 | CATDEGNTP | | | 12-3*01, | CASGLDTQYF | 2590 |
| | | | | | | | | LVF | | | 12-4*01 | | 2673 |
| D1 | Neo⁺WT⁻ | SEC24A_P5L | 0 | 0 | 0 | 0 | | | | | | | |
| D10 | Neo⁺WT⁻ | SEC24A_P5L | 0 | 0 | 0 | 0 | | | | | | | |
| E14 | Neo⁺WT⁻ | SEC24A_P5L | 0 | 0 | 0 | 0 | | | | | | | |
| E3 | Neo⁺WT⁻ | SEC24A_P5L | 0 | 0 | 0 | 0 | | | | | | | |
| F15 | Neo⁺WT⁻ | SEC24A_P5L | 0 | 0 | 0 | 0 | | | | | | | |
| F23 | Neo⁺WT⁻ | SEC24A_P5L | 0 | 0 | 0 | 0 | 39*01 | CAVDGGEYG | | | | | 2591 |
| | | | | | | | | NKLVF | | | | | |
| F24 | Neo⁺WT⁻ | SEC24A_P5L | 0 | 0 | 0 | 0 | | | | | 28*01 | CASSLTGVD | 2674 |
| | | | | | | | | | | | | GYTF | |
| F8 | Neo⁺WT⁻ | SEC24A_P5L | 0 | 0 | 0 | 0 | 17*01 | CATDDTGGF | | | | | 2592 |
| | | | | | | | | KTIF | | | | | |
| F9 | Neo⁺WT⁻ | SEC24A_P5L | 0 | 0 | 0 | 0 | 38-2/DV8*01 | CAYNPDMRF | | | 20-1*01 | CSAAYNTFGE | 2593 |
| | | | | | | | | | | | | QFF | 2675 |
| C20 | Neo⁺WT⁻ | SMARCD3_H8Y | 0 | 0 | 0 | 0 | | | | | | | |
| E2 | Neo⁺WT⁻ | SMARCD3_H8Y | 0 | 0 | 0 | 0 | | | | | | | |
| E24 | Neo⁺WT⁻ | SMARCD3_H8Y | 0 | 0 | 0 | 0 | 8-2*01 | CVVSLHTGG | | | | | 2594 |
| | | | | | | | | FKTIF | | | | | |
| F7 | Neo⁺WT⁻ | SMARCD3_H8Y | 0 | 0 | 0 | 0 | | | | | | | |
| D17 | Neo⁺WT⁻ | SNX24_P6L | 0 | 0 | 0 | 0 | | | | | 20-1*01 | CSATSGTDT | 2676 |
| | | | | | | | | | | | | QYF | |
| D7 | Neo⁺WT⁻ | SNX24_P6L | 0 | 0 | 0 | 0 | 13-2*01 | CAENVTGNQ | | | 13*01 | CASSLGGFAG | 2595 |
| | | | | | | | | FYF | | | | NTIYF | 2677 |
| E1 | Neo⁺WT⁻ | SNX24_P6L | 0 | 0 | 0 | 0 | 38-2/DV8*01 | CASKRGGAD | | | | | 2596 |
| | | | | | | | | GLTF | | | | | |
| C18 | Neo⁺WT⁻ | USP28_C5F | 0 | 0 | 0 | 0 | | | | | | | |
| E20 | Neo⁺WT⁻ | USP28_C5F | 0 | 0 | 0 | 0 | | | | | | | |
| B12 | Neo⁺WT⁻ | WDR46_T3I | 0 | 0 | 0 | 0 | | | | | | | |
| B3 | Neo⁺WT⁻ | WDR46_T3I | 0 | 0 | 0 | 0 | | | | | | | |
| B7 | Neo⁺WT⁻ | WDR46_T3I | 0 | 0 | 0 | 0 | | | | | | | |
| E11 | Neo⁺WT⁻ | WDR46_T3I | 0 | 0 | 0 | 0 | | | | | 29-1*01 | CSSPGREGP | 2878 |
| | | | | | | | | | | | | QYF | |
| E5 | Neo⁺WT⁻ | WDR46_T3I | 0 | 0 | 0 | 0 | | | | | | | |
| G5 | Neo⁻WT⁺ | AKAP13 | 0 | 0 | 0 | 0 | | | | | | | |
| H21 | Neo⁻WT⁺ | AKAP13 | 0 | 0 | 0 | 0 | 38-2/DV8*01 | CAYSPPLVF | | | 6-2*01, | CASRGGDGET | 2597 |
| | | | | | | | | | | | 6-3*01 | QYF | 2679 |
| J11 | Neo⁻WT⁺ | AKAP13 | 0 | 0 | 0 | 0 | 38-2/DV8*01 | CAFAPGNNN | | | | | 2598 |
| | | | | | | | | DMRF | | | | | |
| K9 | Neo⁻WT⁺ | AKAP13 | 0 | 0 | 0 | 0 | 38-1*01 | CAYFPYGQN | | | 9*01 | CASGDSGALE | 2599 |
| | | | | | | | | FVF | | | | FF | 2680 |
| L4 | Neo⁻WT⁺ | AKAP13 | 0 | 0 | 0 | 0 | | | | | | | |
| H19 | Neo⁻WT⁺ | COL18A1 | 0 | 0 | 0 | 0 | | | | | 19*01 | CASSSAGTE | 2681 |
| | | | | | | | | | | | | AFF | |
| L14 | Neo⁻WT⁺ | COL18A1 | 0 | 0 | 0 | 0 | 14/DV4*01 | CAMRVSDNF | | | | | 2600 |
| | | | | | | | | NKFYF | | | | | |
| G11 | Neo⁻WT⁺ | FNDC3B | 0 | 0 | 0 | 0 | | | | | | | |
| G1 | Neo⁻WT⁺ | GANAB | 0 | 0 | 0 | 0 | | | | | | | |
| G10 | Neo⁻WT⁺ | GANAB | 0 | 0 | 0 | 0 | | | | | | | |
| H15 | Neo⁻WT⁺ | GANAB | 0 | 0 | 0 | 0 | | | | | | | |
| H22 | Neo⁻WT⁺ | GANAB | 0 | 0 | 0 | 0 | | | | | | | |
| I21 | Neo⁻WT⁺ | GANAB | 0 | 0 | 0 | 0 | | | | | 4-3*01 | CASSQGGGG | 2682 |
| | | | | | | | | | | | | TDTQYF | |
| J14 | Neo⁻WT⁺ | GANAB | 0 | 0 | 0 | 0 | | | | | | | |
| J2 | Neo⁻WT⁺ | GANAB | 0 | 0 | 0 | 0 | 5*01 | CAESPSNFG | | | | | 2601 |
| | | | | | | | | NEKLTF | | | | | |
| L16 | Neo⁻WT⁺ | GANAB | 0 | 0 | 0 | 0 | | | | | | | |
| L3 | Neo⁻WT⁺ | GANAB | 0 | 0 | 0 | 0 | | | | | | | |
| M5 | Neo⁻WT⁺ | GANAB | 0 | 0 | 0 | 0 | | | | | | | |
| N4 | Neo⁻WT⁺ | GANAB | 0 | 0 | 0 | 0 | 13-2*01 | CAENPCSND | | | | | 2602 |
| | | | | | | | | YKLSF | | | | | |
| K14 | Neo⁻WT⁺ | MAGEA3_KVAE | 0 | 0 | 0 | 0 | | | | | 19*01 | CATWDSGNI | 2683 |
| | | | | | | | | | | | | QYF | |
| J15 | Neo⁻WT⁺ | MLL2 | 0 | 0 | 0 | 0 | 12-2*01 | CAVTSNTGK | | | | | 2603 |
| | | | | | | | | LIF | | | | | |
| J6 | Neo⁻WT⁺ | MLL2 | 0 | 0 | 0 | 0 | | | | | | | |
| K16 | Neo⁻WT⁺ | MLL2 | 0 | 0 | 0 | 0 | | | | | 20-1*01 | CSATCNGTF | 2684 |
| | | | | | | | | | | | | LYQETQYF | |
| M9 | Neo⁻WT⁺ | MLL2 | 0 | 0 | 0 | 0 | 14/DV4*01 | CAMREDYSS | | | 4-3*01 | CASSQGPPGS | 2604 |
| | | | | | | | | ASKIIF | | | | GGGNEQFF | 2685 |
| I4 | Neo⁻WT⁺ | MRM1 | 0 | 0 | 0 | 0 | 12-3*01 | CAMALGNTG | | | | | 2605 |
| | | | | | | | | NQFYF | | | | | |
| J7 | Neo⁻WT⁺ | MRM1 | 0 | 0 | 0 | 0 | | | | | | | |
| K7 | Neo⁻WT⁺ | MRM1 | 0 | 0 | 0 | 0 | 12-2*01 | CAASGGGAD | | | | | 2606 |
| | | | | | | | | GLTF | | | | | |
| L7 | Neo⁻WT⁺ | MRM1 | GANAB | 0 | 0 | 0 | | | | | | | |
| L9 | Neo⁻WT⁺ | MRM1 | 0 | 0 | 0 | 0 | | | | | | | |
| N5 | Neo⁻WT⁺ | MRM1 | 0 | 0 | 0 | 0 | 12-2*01 | CAGYSGGGA | | | 6-5*01 | CASSSLGDSY | 2607 |
| | | | | | | | | DGLTF | | | | EQYF | 2686 |
| N9 | Neo⁻WT⁺ | MRM1 | 0 | 0 | 0 | 0 | 12-2*01 | CAVNGNQFY | | | 12-3*01, | CASSLGGPGA | 2608 |
| | | | | | | | | F | | | 12-4*01 | FF | 2687 |
| G8 | Neo⁻WT⁺ | PGM5 | 0 | 0 | 0 | 0 | 35*01 | CEGNNNDMR | 19*01 | CALTTDSNSG | | | 2609 |
| | | | | | | | | F | | YALNF | | | 2614 |
| N6 | Neo⁻WT⁺ | PGM5 | 0 | 0 | 0 | 0 | | | | | | | |
| G13 | Neo⁻WT⁺ | SEC24A | 0 | 0 | 0 | 0 | | | | | | | |
| I10 | Neo⁻WT⁺ | SEC24A | 0 | 0 | 0 | 0 | | | | | | | |
| K6 | Neo⁻WT⁺ | SEC24A | 0 | 0 | 0 | 0 | | | | | | | |
| M6 | Neo⁻WT⁺ | SEC24A | 0 | 0 | 0 | 0 | 22*01 | CAVAHARLM | | | 6-2*01, | CASSSDINYG | 2610 |
| | | | | | | | | F | | | 6-3*01 | YTF | 2688 |
| M8 | Neo⁻WT⁺ | SEC24A | 0 | 0 | 0 | 0 | | | | | 6-5*01 | CASSYSSGY | 2689 |
| | | | | | | | | | | | | GYTF | |
| O3 | Neo⁻WT⁺ | SMARCD3 | 0 | 0 | 0 | 0 | 8-3*01 | CAVGVEYGN | | | | | 2611 |
| | | | | | | | | KLVF | | | | | |
| K18 | Neo⁻WT⁺ | SNX24 | 0 | 0 | 0 | 0 | | | | | | | |
| H18 | Neo⁻WT⁺ | TEAD1_(VLE) | 0 | 0 | 0 | 0 | 24*01 | CAFSQYGNK | | | | | 2612 |
| | | | | | | | | LVF | | | | | |
| J3 | Neo⁻WT⁺ | USP28 | 0 | 0 | 0 | 0 | | | | | | | |
| H13 | Neo⁻WT⁺ | WDR46 | 0 | 0 | 0 | 0 | | | | | | | |
| J22 | Neo⁻WT⁺ | WDR46 | 0 | 0 | 0 | 0 | | | | | | | |

TABLE 8
Description of neoantigen and wildtype peptides used for experiment 5 and 6.

| | | | | | Position | | | Wildtype | | | Mutant |
|---|---|---|---|---|---|---|---|---|---|---|---|
| | | | Wild- | | of | | | HLA-A2 | | | HLA-A2 |
| | | | type | Mutant | mutation | | SEQ | Binding | | SEQ | Binding |
| Wildtype | | HUGO | amino | amino | in | Wildtype | ID | NetMHC | Mutant | ID | NetMHC |
| Name | Mutant Name | symbol | acid | acid | peptide | peptide | NO: | 4.0 (nM) | peptide | NO: | 4.0 (nM) |
| CHST13-VLV | CHST13-VLV_V1M | CHST13 | V | M | 1 | VLVDDAHGL | 2690 | 43.6 | MLVDDAHGL | 2848 | 13 |
| A2ML1-YLD | A2ML1-YLD_K7R | A2ML1 | K | R | 7 | YLDELIKNT | 2691 | 86.4 | YLDELIRNT | 2849 | 71.9 |
| (WT) | | | | | | | | | | | |
| AGFG2-FLQ | AGFG2-FLQ_S4S | AGFG2 | S | F | 4 | FLQSRGNEV | 2692 | 29.6 | FLQFRGNEV | 2850 | 47.7 |
| AGXT2L2-ILT | AGXT2L2-ILT_M5I | AGXT2L2 | M | I | 5 | ILTDMEEKV | 2693 | 75 | ILTDIEEKV | 2851 | 49.5 |
| AHNAK-SMP | AHNAK-SMP_S1F | AHNAK | S | F | 1 | SMPDFDLHL | 2694 | 22.9 | FMPDFDLHL | 2852 | 5.5 |
| AKAP13-KLM | AKAP13-KLM_Q8K | AKAP13 | Q | K | 8 | KLMNIQQQL | 2695 | 15.4 | KLMNIQQKL | 2853 | 20.3 |
| APBB2-GML | APBB2-GML_L3F | APBB2 | L | F | 3 | GMLPVDKPV | 2696 | 31 | GMFPVDKPV | 2854 | 20 |
| APBB2-VQY | APBB2-VQY_L7F | APBB2 | L | F | 7 | VQYLGMLPV | 2697 | 48.3 | VQYLGMFPV | 2855 | 12 |
| APCDD1L-RLP | APCDD1L-RLP_R1W | APCDD1L | R | W | 1 | RLPHVEYEL | 2698 | 51.1 | WLPHVEYEL | 2856 | 24 |
| ATP6AP1-KLG | ATP6AP1-KLG_G3W | ATP6AP1 | G | W | 32 | KLGASPLHV | 2699 | 50.2 | KLWASPLHV | 2857 | 5.5 |
| BAIAP3-ILN | BAIAP3-ILN_V6I | BAIAP3 | V | I | 6 | ILNVDVFTL | 2700 | 38.2 | ILNVDIFTL | 2858 | 26.8 |
| BCL9L-FVY | BCL9L-FVY_T6I | BCL9L | T | I | 6 | FVYVFTTHL | 2701 | 41.8 | FVYVFITHL | 2859 | 45.1 |
| BTBD1-FML | BTBD1-FML_LI | BTBD1 | L | I | 10 | FMLLTQARL | 2702 | 27.6 | FMLLTQARI | 2860 | 33.7 |
| C15orf32-MLS | C15orf32-MLS_G9R | C15orf32 | G | R | 9 | MLSILALVGV | 2703 | 42.6 | MLSILALVRV | 2861 | 90.8 |
| C17orf75-ALS | C17orf75-ALS_V7A | C17orf75 | V | A | 7 | ALSYTPVEV | 2704 | 22.7 | ALSYTPAEV | 2862 | 31.8 |
| C1S-10 | C1S-10_N1H | C1S | N | H | 1 | NLMDGDLGLI | 2705 | 55.9 | HLMDGDLGLI | 2863 | 50.4 |
| C1S-9 | C1S-9_N1H | C1S | N | H | 1 | NLMDGDLGL | 2706 | 12.9 | HLMDGDLGL | 2864 | 11.8 |
| | | 2707 | | | | | | | | | |
| C3orf58-LMV | C3orf58-LMV_L4P | C3orf58 | L | P | 4 | LMVLHSPSL | 2707 | 50 | LMVPHSPSL | 2865 | 31.9 |
| CAMK1D-KLF | CAMK1D-KLF_K8N | CAMK1D | K | N | 8 | KLFEQILKA | 2708 | 8.6 | KLFEQILNA | 2866 | 6.8 |
| CCM2-YML | CCM2-YML_R6H | CCM2 | R | H | 6 | YMLTLRTKL | 2709 | 36.3 | YMLTLHTKL | 2867 | 14.1 |
| CD47-GLT | CD47-GLT_V6F | CD47 | V | F | 6 | GLTSFVIAI | 2710 | 29.2 | GLTSFFIAI | 2868 | 38.3 |
| CDC37L1-FLS | CDC37L1-FLS_P6L | CDC37L1 | P | L | 6 | FLSDHPYLV | 2711 | 2.5 | FLSDHLYLV | 2869 | 2 |
| CELSR1-YLF | CELSR1-YLF_F3L | CELSR1 | F | L | 3 | YLFAIFSGL | 2712 | 4.5 | YLLAIFSGL | 2870 | 4.9 |
| CHD8-KLN | CHD8-KLN_P7A | CHD8 | P | A | 7 | KLNTITPVV | 2713 | 9 | KLNTITAVV | 2871 | 18.4 |
| CHST14-MLM | CHST14-MLM_F4L | CHST14 | F | L | 4 | MLMFAVIVA | 2714 | 18.5 | MLMLAVIVA | 2872 | 35.9 |
| CLCN4-LLA | CLCN4-LLA_G8V | CLCN4 | G | V | 8 | LLAGTLAGV | 2715 | 9.6 | LLAGTLAVV | 2873 | 17.7 |
| CNKSR1-SLA | CNKSR1-SLA_A9V | CNKSR1 | A | V | 9 | SLAPLSPRA | 2716 | 64.7 | SLAPLSPRV | 2874 | 9.9 |
| COL18A1-VLL | COL18A1-VLL_S8F | COL18A1 | S | F | 8 | VLLGVKLSGV | 2717 | 32.5 | VLLGVKLFGV | 2875 | 9.1 |
| DCHS1-TLF | DCHS1-TLF_I5M | DCHS1 | I | M | 5 | TLFTIVGTV | 2718 | 40.6 | TLFTMVGTV | 2876 | 39.6 |
| DHX33-LLA | DHX33-LLA_M4I | DHX33 | M | I | 4 | LLAMKVPNV | 2719 | 8.3 | LLAIKVPNV | 2877 | 13.7 |
| DHX33-LLA | DHX33-LLA_K5T | DHX33 | K | T | 5 | LLAMKVPNV | 2720 | 8.3 | LLAMTVPNV | 2878 | 8.5 |
| DNAH8-FMT | DNAH8-FMT_G7D | DNAH8 | G | D | 7 | FMTKINGLEV | 2721 | 24.6 | FMTKINDLEV | 2879 | 23.4 |
| DOCK7-FLN | DOCK7-FLN_M9L | DOCK7 | M | L | 9 | FLNDLLSVM | 2722 | 15.1 | FLNDLLSVL | 2880 | 6.3 |
| DOLPP1-GLM | DOLPP1-GLM_A4V | DOLPP1 | A | V | 4 | GLMAIAWFI | 2723 | 3.1 | GLMVIAWFI | 2881 | 7 |
| DRAM1-FII | DRAM1-FII_I3F | DRAM1 | I | F | 3 | FIISYVVAV | 2724 | 3.4 | FIFSYVVAV | 2882 | 3.1 |
| ERBB2-ALI | ERBB2-ALI_H8Y | ERBB2 | H | Y | 8 | ALIHHNTHL | 2725 | 79.3 | ALIHHNTYL | 2883 | 17.9 |
| EXOC3L4-ILL | EXOC3L4-ILL_V91 | EXOC3L4 | V | I | 9 | ILLDWAANV | 2726 | 3.5 | ILLDWAANI | 2884 | 6.3 |
| FAM47B-ALF | FAM47B-ALF_A1S | FAM47B | A | S | 1 | ALFSELSPV | 2727 | 3.9 | SLFSELSPV | 2885 | 3.8 |
| FBXL4-SLL | FBXL4-SLL_L2V | FBXL4 | L | V | 2 | SLLEYYTEL | 2728 | 4.1 | SVLEYYTEL | 2886 | 30.9 |
| FLNA-HIA | FLNA-HIA_P6L | FLNA | P | L | 6 | HIAKSPFEV | 2729 | 93.8 | HIAKSLFEV | 2887 | 21.7 |
| FNDC3B-VVL | FNDC3B-VVL_L3M | FNDC3B | L | M | 3 | VVLSWAPPV | 2730 | 9.6 | VVMSWAPPV | 2888 | 5.8 |
| GABRG3-TAM | GABRG3-TAM_L5I | GABRG3 | L | I | 5 | TAMDLFVTV | 2731 | 33.2 | TAMDIFVTV | 2889 | 27.2 |
| GABRG3-YVT | GABRG3-YVT_L7I | GABRG3 | L | I | 7 | YVTAMDLFV | 2732 | 17.2 | YVTAMDIFV | 2890 | 14.3 |
| GALC-YVV | GALC-YVV_V3L | GALC | V | L | 3 | YVVTWIVGA | 2733 | 47.2 | YVLTWIVGA | 2891 | 14 |
| GANAB-ALY | GANAB-ALY_S5F | GANAB | S | F | 5 | ALYGSVPVL | 2734 | 15.3 | ALYGFVPVL | 2892 | 8.3 |
| GCN1L1-10 | GCN1L1-10_L6P | GCN1L1 | L | P | 6 | ALLETLSLLL | 2735 | 35.7 | ALLETPSLLL | 2893 | 53.5 |
| GCN1L1-9 | GCN1L1-9_L6P | GCN1L1 | L | P | 6 | ALLETLSLL | 2736 | 11 | ALLETPSLL | 2894 | 19.9 |
| GLRA1-LIF | GLRA1-LIF_F6L | GLRA1 | F | L | 6 | LIFNMFYWI | 2737 | 16.2 | LIFNMLYWI | 2895 | 10.9 |
| GOLGA3-SLD | GOLGA3-SLD_P4L | GOLGA3 | P | L | 4 | SLDPTTSPV | 2738 | 10.4 | SLDLTTSPV | 2896 | 19 |
| GPR137B-KMS | GPR137B-KMS_S3P | GPR137B | S | P | 3 | KMSLANIYL | 2739 | 19.1 | KMPLANIYL | 2897 | 38.1 |
| GPR174-FSF | GPR174-FSF_P4S | GPR174 | P | S | 4 | FSFPLDFLV | 2740 | 14.8 | FSFSLDFLV | 2898 | 15 |
| GSTA4-FLQ | GSTA4-FLQ_E4K | GSTA4 | E | K | 4 | FLQEYTVKL | 2741 | 4.2 | FLQKYTVKL | 2899 | 11.7 |
| HAUS3-ILN | HAUS3-ILN_T7A | HAUS3 | T | A | 7 | ILNAMITKI | 2742 | 53 | ILNAMIAKI | 2900 | 48.1 |
| HBZ-KLS | HBZ-KLS_A7T | HBZ | A | T | 7 | KLSELHAYI | 2743 | 11.4 | KLSELHTYI | 2901 | 11.7 |
| HERC1-SLL | HERC1-SLL_PS | HERC1 | P | S | 6 | SLLLLPVSV | 2744 | 16.2 | SLLLLSVSV | 2902 | 17.3 |
| HLA-DRB5-YMA | HLA-DRB5-YMA_KE | HLA-DRB5 | K | E | 4 | YMAKLTVTL | 2745 | 5.6 | YMAELTVTL | 2903 | 3 |
| HOXC9-YMY | HOXC9-YMY_G4D | HOXC9 | G | D | 4 | YMYGSPGEL | 2746 | 24.4 | YMYDSPGEL | 2904 | 12.6 |
| HTR1F-10 | HTR1F-10_V1M | HTR1F | V | M | 1 | VMPFSIVYIV | 2747 | 27.5 | MMPFSIVYIV | 2905 | 10.5 |
| HTR1F-9 | HTR1F-9_V1M | HTR1F | V | M | 1 | VMPFSIVYI | 2748 | 31.4 | MMPFSIVYI | 2906 | 10.3 |
| HTR1F-LVM | HTR1F-LVM_V2M | HTR1F | V | M | 2 | LVMPFSIVYI | 2749 | 35.3 | LMMPFSIVYI | 2907 | 5.1 |
| IGF1-TMS | IGF1-TMS_S4F | IGF1 | S | F | 4 | TMSSSHLFYL | 2750 | 14.5 | TMSFSHLFYL | 2908 | 6.1 |
| IL17RA-FIT | IL17RA-FIT_TM | IL17RA | T | M | 3 | FITGISILL | 2751 | 34.8 | FIMGISILL | 2909 | 5.1 |
| INTS1-VLL | INTS1-VLL_L3F | INTS1 | L | F | 3 | VLLHRAFLV | 2752 | 11.3 | VLFHRAFLV | 2910 | 8.6 |
| IPO9-FSS | IPO9-FSS_E4D | IP09 | E | D | 4 | FSSEVLNLV | 2753 | 63.4 | FSSDVLNLV | 2911 | 43.5 |
| ITIH6-RLG | ITIH6-RLG_G3V | ITIH6 | G | V | 3 | RLGPYLEFL | 2754 | 23.4 | RLVPYLEFL | 2912 | 12.6 |
| KAT6A-KLS | KAT6A-KLS_MK | KAT6A | M | K | 7 | KLSREIMPV | 2755 | 5.8 | KLSREIKPV | 2913 | 64.8 |
| KCNB2-LLA | KCNB2-LLA_P6T | KCNB2 | P | T | 6 | LLAILPYYV | 2756 | 5.3 | LLAILTYYV | 2914 | 4.6 |
| KCNC3-FLP | KCNC3-FLP_A7V | KCNC3 | A | V | 7 | FLPDLNANA | 2757 | 21.3 | FLPDLNVNA | 2915 | 14.6 |
| KIF20B-YTS | KIF20B-YTS_S6L | KIF2OB | S | L | 6 | YTSEISSPI | 2758 | 35.4 | YTSEILSPI | 2916 | 14.3 |
| LCP1-NLF | LCP1-NLF_PL | LCP1 | P | L | 7 | NLFNRYPAL | 2759 | 37.3 | NLFNRYLAL | 2917 | 61.6 |
| MAR11-10 | MAR11-10_F1L | MAR11 | F | L | 1 | FLIASVTWLL | 2760 | 4.8 | LLIASVTWLL | 2918 | 15.3 |
| MAR11-9 | MAR11-9_F1L | MAR11 | F | L | 1 | FLIASVTWL | 2761 | 4.3 | LLIASVTWL | 2919 | 15.1 |
| ME1-FLD | ME1-FLD_A8G | ME1 | A | G | 8 | FLDEFMEAV | 2762 | 2.7 | FLDEFMEGV | 2920 | 2.7 |
| MLL2-ALS | MLL2-ALS_L8H | MLL2 | L | H | 8 | ALSPVIPLI | 2763 | 8.1 | ALSPVIPHI | 2921 | 11.3 |
| MPV17-YLW | MPV17-YLW_A5P | MPV17 | A | P | 5 | YLWPAVQLA | 2764 | 5.7 | YLWPPVQLA | 2922 | 9.3 |
| MRGPRF-RLW | MRGPRF-RLW_R1W | MRGPRF | R | W | 1 | RLWEPLRVV | 2765 | 35 | WLWEPLRVV | 2923 | 21.5 |
| MRM1-10 | MRM1-10_T6P | MRM1 | T | P | 6 | LLFGMTPCLL | 2766 | 22.6 | LLFGMPPCLL | 2924 | 34.7 |
| MRM1-9 | MRM1-9_T6P | MRM1 | T | P | 6 | LLFGMTPCL | 2767 | 7.4 | LLFGMPPCL | 2925 | 11.7 |
| MYH4-GLD | MYH4-GLD_D3N | MYH4 | D | N | 3 | GLDETIAKL | 2768 | 30.4 | GLNETIAKL | 2926 | 59.7 |
| MYPN-RVI | MYPN-RVI_R1L | MYPN | R | L | 1 | RVIGMPPPV | 2769 | 36 | LVIGMPPPV | 2927 | 20.7 |
| NBPF24-LLD | NBPF24-LLD_E6G | NBPF24 | E | G | 6 | LLDEKEPEV | 2770 | 13.1 | LLDEKGPEV | 2928 | 12.2 |
| NOS1-FID | NOS1-FID_D3Y | NOS1 | D | Y | 3 | FIDQYYSSI | 2771 | 40.9 | FIYQYYSSI | 2929 | 22.7 |
| NSDHL-ILT | NSDHL-ILT_A9V | NSDHL | A | V | 9 | ILTGLNYEA | 2772 | 41.7 | ILTGLNYEV | 2930 | 7.4 |
| OASL-ILD | OASL-ILD_DN | OASL | D | N | 3 | ILDPADPTL | 2773 | 37 | ILNPADPTL | 2931 | 73.5 |
| OR10A3-ILI | OR10A3-ILI_V6F | OR10A3 | V | F | 6 | ILIVMVPFL | 2774 | 10.4 | ILIVMFPFL | 2932 | 12.3 |
| OR14C36-FML | OR14C36-FML_V6L | OR14C36 | V | L | 6 | FMLYLVTLM | 2775 | 9.5 | FMLYLLTLM | 2933 | 7.6 |
| OR1G1-FLF | OR1G1-FLF_T8M | OR1G1 | T | M | 8 | FLFMYLVTV | 2776 | 3.3 | FLFMYLVMV | 2934 | 3.6 |
| OR2T1-FLN | OR2T1-FLN_F5L | OR2T1 | F | L | 5 | FLNVFFPLL | 2777 | 8.4 | FLNVLFPLL | 2935 | 11.5 |
| OR5K2-YIF | OR5K2-YIF_GE | OR5K2 | G | E | 5 | YIFLGNLAL | 2778 | 23.5 | YIFLENLAL | 2936 | 40.8 |
| OR5M3-KMV | OR5M3-KMV_T8N | OR5M3 | T | N | 8 | KMVAVFYTT | 2779 | 46.2 | KMVAVFYNT | 2937 | 55 |
| OR6F1-VLN | OR6F1-VLN_T8M | OR6F1 | T | M | 8 | VLNPFIYTL | 2780 | 8.8 | VLNPFIYML | 2938 | 10.8 |
| OR8B8-YVN | OR8B8-YVN_V2L | OR8B8 | V | L | 2 | YVNELVVFV | 2781 | 5.9 | YLNELVVFV | 2939 | 2.6 |
| OR8D4-10 | OR8D4-10_G3E | OR8D4 | G | E | 3 | FLGIYTVTVV | 2782 | 26.5 | FLEIYTVTVV | 2940 | 35.9 |
| OR8D4-9 | OR8D4-9_G3E | OR8D4 | G | E | 3 | FLGIYTVTV | 2783 | 8.2 | FLEIYTVTV | 2941 | 17 |
| OR9Q2-FLF | OR9Q2-FLF_S8F | OR9Q2 | S | F | 8 | FLFTFFASI | 2784 | 4.2 | FLFTFFAFI | 2942 | 3.8 |
| OR9Q2-SID | OR9Q2-SID_S1F | OR9Q2 | S | F | 1 | SIDCYLLAI | 2785 | 45.3 | FIDCYLLAI | 2943 | 7.3 |
| OVOL1-SLL | OVOL1-SLL_L9V | OVOL1 | L | V | 9 | SLLQGSPHL | 2786 | 18.2 | SLLQGSPHV | 2944 | 9.5 |
| PABPC1-MLG | PABPC1-MLG_R5Q | PABPC1 | R | Q | 5 | MLGERLFPL | 2787 | 4 | MLGEQLFPL | 295 | 3.4 |
| PCDHB3-FLF | PCDHB3-FLF_SL | PCDHB3 | S | L | 4 | FLFSVLLFV | 2788 | 2.5 | FLFLVLLFV | 2946 | 5.9 |
| PELP1-LVL | PELP1-LVL_L3F | PELP1 | L | F | 3 | LVLPLVMGV | 2789 | 22.2 | LVFPLVMGV | 2947 | 16.5 |
| PELP1-RLH | PELP1-RLH_L7F | PELP1 | L | F | 7 | RLHDLVLPL | 2790 | 10.6 | RLHDLVFPL | 2948 | 4.7 |
| PGM5-AVG | PGM5-AVG_H5Y | PGM5 | H | Y | 5 | AVGSHVYSV | 2791 | 91.5 | AVGSYVYSV | 2949 | 29.3 |
| PHKA2-LLS | PHKA2-LLS_SF | PHKA2 | S | F | 6 | LLSIISFPA | 2792 | 33.3 | LLSIIFFPA | 2950 | 43.9 |
| PIGN-FLT | PIGN-FLT_P7H | PIGN | P | H | 7 | FLTVFSPFM | 2793 | 11.5 | FLTVFSHFM | 2951 | 25.7 |
| PLXNB1-VLF | PLXNB1-VLF_V1L | PLXNB1 | V | L | 1 | VLFAAFSSA | 2794 | 33.5 | LLFAAFSSA | 2952 | 26 |
| PRSS16-LLL | PRSS16-LLL_L1Q | PRSS16 | L | Q | 1 | LLLVSLWGL | 2795 | 9.4 | QLLVSLWGL | 2953 | 22.9 |
| PTCHD4-HQL | PTCHD4-HQL_G5V | PTCHD4 | G | V | 5 | HQLGGVVEV | 2796 | 49.2 | HQLGVVVEV | 2954 | 54 |
| PXDNL-SIL | PXDNL-SIL_S1F | PXDNL | S | F | 1 | SILDAVQRV | 2797 | 31.4 | FILDAVQRV | 2955 | 5.7 |
| REV3L-KLS | REV3L-KLS_R6H | REV3L | R | H | 6 | KLSEYRNSL | 2798 | 49.7 | KLSEYHNSL | 2956 | 19.7 |
| RRP1B-LLA | RRP1B-LLA_L7F | RRP1B | L | F | 7 | LLADQNLKFI | 2799 | 83.6 | LLADQNFKFI | 2957 | 30.1 |
| RYR3-VLN | RYR3-VLN_E6K | RYR3 | E | K | 6 | VLNYFEPYL | 2800 | 10.2 | VLNYFKPYL | 2958 | 20.4 |
| SCN3A-ALV | SCN3A-ALV_P7S | SCN3A | P | S | 7 | ALVGAIPSI | 2801 | 12.3 | ALVGAISSI | 2959 | 50.4 |
| SEC24A-FLY | SEC24A-FLY_P5L | SEC24A | P | L | 5 | FLYNPLTRV | 2802 | 4.4 | FLYNLLTRV | 2960 | 3.3 |
| SH3RF2-HMV | SH3RF2-HMV_MI | SH3RF2 | M | 1 | 2 | HMVEISTPV | 2803 | 6.4 | HIVEISTPV | 2961 | 34.1 |
| SHROOM2-KLL | SHROOM2-KLL_D6V | SHROOM2 | D | V | 6 | KLLAGDEIV | 2804 | 31.1 | KLLAGVEIV | 2962 | 11.1 |
| SLC15A2-ILG | SLC15A2-ILG_G4E | SLC15A2 | G | E | 4 | ILGGQVVHTV | 2805 | 86.8 | ILGEQVVHTV | 2963 | 49 |
| SLC16A7-AMA | SLC16A7-AMA_P6L | SLC16A7 | P | L | 6 | AMAGSPVFL | 2806 | 19.4 | AMAGSLVFL | 2964 | 8.1 |
| SLC1A2-YMS | SLC1A2-YMS_S3P | SLC1A2 | S | P | 3 | YMSTTIIAA | 2807 | 8.3 | YMPTTIIAA | 2965 | 13.8 |
| SLC2A3-ILV | SLC2A3-ILV_L9M | SLC2A3 | L | M | 9 | ILVAQIFGL | 2808 | 9 | ILVAQIFGM | 2966 | 28 |
| SLC2A4-ILI | SLC2A4-ILI_A4T | SLC2A4 | A | T | 4 | ILIAQVLGL | 2809 | 17.4 | ILITQVLGL | 2967 | 22.6 |
| SLC38A1-RIW | SLC38A1-RIW_W3L | SLC38A1 | W | L | 3 | RIWAALFLGL | 2810 | 70.9 | RILAALFLGL | 2968 | 96.9 |
| SLC39A4-LLG | SLC39A4-LLG_G4S | SLC39A4 | G | S | 4 | LLGGVVTVLL | 2811 | 27.9 | LLGSWTVLL | 2969 | 22.7 |
| SMARCD3-KLF | SMARCD3-KLF_H8Y | SMARCD3 | H | Y | 8 | KLFEFLVHGV | 2812 | 4.4 | KLFEFLVYGV | 2970 | 3.3 |
| SMOX-KLA | SMOX-KLA_KN | SMOX | K | N | 4 | KLAKPLPYT | 2813 | 88.9 | KLANPLPYT | 2971 | 59.8 |
| SNX24-KLS | SNX24-KLS_P6L | SNX24 | P | L | 6 | KLSHQPVLL | 2814 | 85.1 | KLSHQLVLL | 2972 | 25.8 |
| SPOP N147I- | SPOP N147I- | SPOP | N | I | 7 | FLLDEANGL | 2815 | 5.5 | FLLDEAIGL | 2973 | 3.3 |
| FLL | FLL_N7I | | | | | | | | | | |
| SREBF1-YLQ | SREBF1-YLQ_L6M | SREBF1 | L | M | 6 | YLQDSLATT | 2816 | 20 | YLQDSMATT | 2974 | 28.2 |
| SSPN-10 | SSPN-10_S9F | SSPN | S | F | 9 | FLMASISSSL | 2817 | 9.2 | FLMASISSFL | 2975 | 6.3 |
| SSPN-9 | SSPN-9_S9F | SSPN | S | F | 9 | FLMASISSS | 2818 | 21.8 | FLMASISSF | 2976 | 31.7 |
| SSPN-LMA | SSPN-LMA_S8F | SSPN | S | F | 8 | LMASISSSL | 2819 | 22.7 | LMASISSFL | 2977 | 10.5 |
| ST6GALNAC2- | ST6GALNAC2- | ST6GALNAC2 | Y | H | 6 | LLFALYFSA | 2820 | 7.4 | LLFALHFSA | 2978 | 9.6 |
| LLF | LLF_Y6H | | | | | | | | | | |
| STOX1-RLM | STOX1-RLM_M3I | STOX1 | M | I | 3 | RLMKHYPGI | 2821 | 18.5 | RLIKHYPGI | 2979 | 50.4 |
| TAS1R2-FMS | TAS1R2-FMS_A4S | TAS1R2 | A | S | 4 | FMSAYSGVL | 2822 | 25.4 | FMSSYSGVL | 2980 | 28 |
| TBX3-GMG | TBX3-GMG_T8M | TBX3 | T | M | 8 | GMGPLLATV | 2823 | 19.7 | GMGPLLAMV | 2981 | 20.2 |
| TEAD1-SVL | TEAD1-SVL_L9F | TEAD1 | L | F | 9 | SVLENFTILL | 2824 | 182.7 | SVLENFTIFL | 2982 | 84.7 |
| TEAD1-VLE | TEAD1-VLE_L8F | TEAD1 | L | F | 8 | VLENFTILLV | 2825 | 138.5 | VLENFTIFLV | 2983 | 50.6 |
| TEX2-FLM | TEX2-FLM_K8N | TEX2 | K | N | 8 | FLMTLETKM | 2826 | 13.2 | FLMTLETNM | 2984 | 9.3 |
| TMEM127-VTF | TMEM127-VTF_L9V | TMEM127 | L | V | 9 | VTFAVSFYLV | 2827 | 41.4 | VTFAVSFYVV | 2985 | 41.4 |
| TMEM195-ALS | TMEM195-ALS_S3L | TMEM195 | S | L | 3 | ALSQVTLLL | 2828 | 73.6 | ALLQVTLLL | 2986 | 40.6 |
| TP73-YTP | TP73-YTP_P3S | TP73 | P | S | 3 | YTPEHAASV | 2829 | 69 | YTSEHAASV | 2987 | 34.2 |
| TPP2-SLA | TPP2-SLA_WL | TPP2 | W | L | 7 | SLAETFWET | 2830 | 10.3 | SLAETFLET | 2988 | 52 |
| TRIM16-RMA | TRIM16-RMA_R1T | TRIM16 | R | T | 1 | RMAAISNTV | 2831 | 14.3 | TMAAISNTV | 2989 | 15.3 |
| TRIM58-VLA | TRIM58-VLA_V1F | TRIM58 | V | F | 1 | VLASPSVPL | 2832 | 38.5 | FLASPSVPL | 2990 | 5.9 |
| TRIM58-YMV | TRIM58-YMV_V3F | TRIM58 | V | F | 3 | YMVLASPSV | 2833 | 4.8 | YMFLASPSV | 2991 | 2.8 |
| TRPC1-MLL | TRPC1-MLL_Q5H | TRPC1 | Q | H | 5 | MLLKQDVSL | 2834 | 27.6 | MLLKHDVSL | 2992 | 15.4 |
| TRPV3-LLL | TRPV3-LLL_A8V | TRPV3 | A | V | 8 | LLLNMLIAL | 2835 | 8.5 | LLLNMLIVL | 2993 | 17.1 |
| TRPV4-FMI | TRPV4-FMI_A6T | TRPV4 | A | T | 6 | FMIGYASAL | 2836 | 5.2 | FMIGYTSAL | 2994 | 3.8 |
| TRPV4-YLL | TRPV4-YLL_A9T | TRPV4 | A | T | 9 | YLLFMIGYA | 2837 | 10.5 | YLLFMIGYT | 2995 | 31.3 |
| TTLL12-KLP | TTLL12-KLP_N7D | TTLL12 | N | D | 7 | KLPLDINPV | 2838 | 15.7 | KLPLDIDPV | 2996 | 21.4 |
| UNC13A-SQL | UNC13A-SQL_S1F | UNC13A | S | F | 1 | SQLNQSFEI | 2839 | 80 | FQLNQSFEI | 2997 | 8.9 |
| USP28-LII | USP28-LII_C5F | USP28 | C | F | 5 | LIIPCIHLI | 2840 | 32.7 | LIIPFIHLI | 2998 | 24.5 |
| VN1R2-LML | VN1R2-LML_L3F | VN1R2 | L | F | 3 | LMLWASSSI | 2841 | 37.3 | LMFWASSSI | 2999 | 23.1 |
| VN1R5-MII | VN1R5-MII_S7Y | VN1R5 | S | Y | 7 | MIISHLSLI | 2842 | 30.9 | MIISHLYLI | 3000 | 7.9 |
| WDR46-FLT | WDR46-FLT_T3I | WDR46 | T | I | 3 | FLTYLDVSV | 2843 | 6.4 | FLIYLDVSV | 3001 | 4 |
| ZDHHC17-LLL | ZDHHC17-LLL_T41 | ZDHHC17 | T | I | 4 | LLLTFNVSV | 2844 | 5.2 | LLLIFNVSV | 3002 | 14.5 |
| ZDHHC7-SLL | ZDHHC7-SLL_P7L | ZDHHC7 | P | L | 7 | SLLWMNPFV | 2845 | 3.7 | SLLWMNLFV | 3003 | 5.1 |
| ZFP90-FTQ | ZFP90-FTQ_EK | ZFP90 | E | K | 5 | FTQEEWYHV | 2846 | 23 | FTQEKWYHV | 3004 | 26.8 |
| ZNF827-NLF | ZNF827-NLF_54I | ZNF827 | S | I | 4 | NLFSQDISV | 2847 | 16 | NLFIQDISV | 3005 | 46.4 |

TABLE 9
TetTCR summary for experiment 5.

| | | | | | | | | | | | | | SEQ |
|---|---|---|---|---|---|---|---|---|---|---|---|---|---|
| Detected Peptide by MID Count | | | | | TCRα, 1 | | TCRα, 2 | | TCRβ | | TCRβ | | ID NO |
| Rank 1 | Rank 2 | Rank 3 | Rank 4 | Rank 5 | TRAV | CDR3α | TRAV | CDR3α | TRBV | CDR3β | TRBV | CDR3β | (L to R) |
| HCV- | HCV- | 0 | 0 | 0 | 38-2/ | CAYRSPPSS | | | 28*01 | CASSFLGTG | | | 3006 |
| KLV(PE) | KLV(APC) | | | | DV8*01 | EKLVF | | | | LNEQYF | | | 3490 |
| HCV- | HCV- | 0 | 0 | 0 | 38-2/ | CAYRSPPSS | | | 28*01 | CASSFLGTG | | | 3006 |
| KLV(APC) | KLV(PE) | | | | DV8*01 | EKLVF | | | | LNEQYF | | | 3490 |
| HCV- | HCV- | 0 | 0 | 0 | 38-2/ | CAYRSPPSS | | | 28*01 | CASSFLGTG | | | 3006 |
| KLV(APC) | KLV(PE) | | | | DV8*01 | EKLVF | | | | LNEQYF | | | 3490 |
| 0 | 0 | 0 | 0 | 0 | | | | | | | | | |
| HCV- | HCV- | 0 | 0 | 0 | 38-2/ | CAYRSPPSS | | | 28*01 | CASSFLGTG | | | 3006 |
| KLV(APC) | KLV(PE) | | | | DV8*01 | EKLVF | | | | LNEQYF | | | 3490 |
| HCV- | HCV- | 0 | 0 | 0 | | | | | | | | | |
| KLV(APC) | KLV(PE) | | | | | | | | | | | | |
| HCV- | HCV- | 0 | 0 | 0 | 38-2/ | CAYRSPPSS | | | 28*01 | CASSFLGTG | | | 3006 |
| KLV(APC) | KLV(PE) | | | | DV8*01 | EKLVF | | | | LNEQYF | | | 3490 |
| HCV- | HCV- | 0 | 0 | 0 | 38-2/ | CAYRSPPSS | | | 28*01 | CASSFLGTG | | | 3006 |
| KLV(APC) | KLV(PE) | | | | DV8*01 | EKLVF | | | | LNEQYF | | | 3490 |
| FNDC3B- | FNDC3B- | 0 | 0 | 0 | 8- | CAVGAEDSN | | | 6-2*01, | CASSYSWGE | | | 3007 |
| VVL_L3M | VVL | | | | 3*01 | YQLIW | | | 6-3*01 | QFF | | | 3491 |
| OR6F1- | OR6F1- | 0 | 0 | 0 | | | | | 6-2*01, | CASTHWERV | | | 3492 |
| VLN | VLN_T8M | | | | | | | | 6-3*01 | DEQFF | | | |
| OR14C36- | OR14C36- | IL17RA- | 0 | 0 | 17*01 | CATDVNNDM | | | 6-5*01 | CASSYGVNT | | | 3008 |
| FML_V6L | FML | FIT_TM | | | | RF | | | | EAFF | | | 3493 |
| TTLL12- | TTLL12- | GP100- | 0 | 0 | 24*01 | CASFMDSNY | | | 10-3*01 | CAISRGDTE | | | 3009 |
| KLP_N7D | KLP | ALL | | | | QLIW | | | | AFF | | | 3494 |
| ME1- | ME1-FLD | 0 | 0 | 0 | 14/ | CAMRASLQG | | | 15*01 | CATSAKTRL | | | 3010 |
| FLD_A8G | | | | | DV4*01 | AQKLVF | | | | NTEAFF | | | 3495 |
| OR14C36- | 0 | 0 | 0 | 0 | 17*01 | CATDAQFLR | | | | | | | 3011 |
| FML_V6L | | | | | | SGAGSYQLT | | | | | | | |
| | | | | | | F | | | | | | | |
| 0 | 0 | 0 | 0 | 0 | 9-2*01 | CALWGTYKY | | | 13*01 | CASSKGQGA | | | 3012 |
| | | | | | | IF | | | | NYGYTF | | | 3496 |
| RYR3- | RYR3-VLN | TAS1R2- | OR10A3- | 0 | 8-3*01 | CAVGGEKLT | | | 5-1*01 | CASSLIDSPY | | | 3013 |
| VLN_E6K | | FMS | ILI | | | F | | | | EQYF | | | 3497 |
| FNDC3B- | FNDC3B- | 0 | 0 | 0 | 29/ | CAASATGGT | | | | | | | 3014 |
| VVL_L3M | VVL | | | | DV5*01 | SYGKLTF | | | | | | | |
| DHX33- | DHX33- | 0 | 0 | 0 | 12-2*01 | CASEVGGYA | | | | | | | 3015 |
| LLA | LLA_M4I | | | | | LNF | | | | | | | |
| 0 | 0 | 0 | 0 | 0 | | | | | | | | | |
| IGF1- | 0 | 0 | 0 | 0 | | | | | | | | | |
| TMS_S4F | | | | | | | | | | | | | |
| HAUS3- | HAUS3- | 0 | 0 | 0 | 24*01 | CAPHSGYST | | | 28*01 | CASSLGPNS | | | 3016 |
| ILN_T7A | ILN | | | | | LTF | | | | PLHF | | | 3498 |
| DHX33- | 0 | 0 | 0 | 0 | 12-2*01 | CAVIGTDKLI | | | 2*01 | CASGSYEQY | | | 3017 |
| LLA_M4I | | | | | | F | | | | F | | | 3499 |
| FNDC3B- | FNDC3B- | 0 | 0 | 0 | 29/ | CAASHGSSN | | | | | | | 3018 |
| VVL_L3M | VVL | | | | DV5*01 | TGKLIF | | | | | | | |
| 0 | 0 | 0 | 0 | 0 | | | | | | | | | |
| NSDHL- | 0 | 0 | 0 | 0 | 24*01 | CAFSGNTPL | | | | | | | 3019 |
| ILT_A9V | | | | | | VF | | | | | | | |
| HTR1F- | HTR1F-9 | GLRA1- | HTR1F- | 0 | 9-2*01 | CALSDRGGG | | | 6-5*01 | CASSSQTGP | | | 3020 |
| 9_V1M | | LIF_F6L | LVM_V2M | | | ADGLTF | | | | YSNQPQHF | | | 3500 |
| VN1R2- | MPV17- | VN1R2- | 0 | 0 | 12-2*01 | CAVGGDSSY | | | | | | | 3021 |
| LML_L3F | YLW_A5P | LML | | | | KLIF | | | | | | | |
| PHKA2- | PHKA2- | 0 | 0 | 0 | 6-5*01 | CASRDSVGG | | | | | | | 3501 |
| LLS_SF | LLS | | | | | GEGYTF | | | | | | | |
| SLC1A2- | 0 | 0 | 0 | 0 | 12-2*01 | CAAPPDSSY | | | | | | | 3022 |
| YMS_S3P | | | | | | KLIF | | | | | | | |
| GABRG3- | 0 | 0 | 0 | 0 | | | | | | | | | |
| TAM_L5I | | | | | | | | | | | | | |
| TRPV4- | TRPV4- | 0 | 0 | 0 | | | | | 27*01 | CASSVTGRW | | | 3502 |
| YLL_A9T | YLL | | | | | | | | | VPLHF | | | |
| 0 | 0 | 0 | 0 | 0 | | | | | | | | | |
| APBB2- | APBB2- | 0 | 0 | 0 | 12-2*01 | CAVTPTDSW | | | 13*01 | CASSQNGSE | | | 3023 |
| VQY | VQY_L7F | | | | | GKLQF | | | | AAYSNQPQH | | | 3503 |
| | | | | | | | | | | F | | | |
| CNKSR1- | CNKSR1- | 0 | 0 | 0 | | | | | | | | | |
| SLA_A9V | SLA | | | | | | | | | | | | |
| DOCK7- | DOCK7- | 0 | 0 | 0 | 21*01 | CAVRPLNTG | | | | | | | 3024 |
| FLN_M9L | FLN | | | | | TASKLTF | | | | | | | |
| OR6F1- | OR6F1- | 0 | 0 | 0 | 41*01 | CAVEGSRLT | | | | | | | 3025 |
| VLN_T8M | VLN | | | | | F | | | | | | | |
| DHX33- | DHX33- | KCNB2- | 0 | 0 | | | | | | | | | |
| LLA_M4I | LLA | LLA_P6T | | | | | | | | | | | |
| HTR1F- | HTR1F- | 0 | 0 | 0 | | | | | | | | | |
| 10_V1M | 10 | | | | | | | | | | | | |
| IL17RA- | 0 | 0 | 0 | 0 | | | | | | | | | |
| FIT_TM | | | | | | | | | | | | | |
| NSDHL- | NSDHL- | 0 | 0 | 0 | | | | | 20-1*01 | CSATGQNYE | | | 3504 |
| ILT_A9V | ILT | | | | | | | | | QYF | | | |
| DOCK7- | DOCK7- | 0 | 0 | 0 | 8-1*01 | CAVNAPTGF | | | 11-2*01 | CASSIGTVN | | | 3026 |
| FLN_M9L | FLN | | | | | QKLVF | | | | RGPNTEAFF | | | 3505 |
| 0 | 0 | 0 | 0 | 0 | 38-1*01 | CAFRQGGSE | | | 19*01 | CASSWQGS | | | 3027 |
| | | | | | | KLVF | | | | NIQYF | | | 3506 |
| OR5M3- | OR5M3- | 0 | 0 | 0 | 12-2*01 | CAVREYSGG | | | 5-6*01 | CASSPITNTG | | | 3028 |
| KMV | KMV_T8N | | | | | GADGLTF | | | | ELFF | | | 3507 |
| CLCN4- | CLCN4- | 0 | 0 | 0 | 19*01 | CALSEAYNN | | | 20-1*01 | CSATLDRNY | | | 3029 |
| LLA_G8V | LLA | | | | | NDMRF | | | | GYTF | | | 3508 |
| HTR1F- | HTR1F-9 | 0 | 0 | 0 | | | | | | | | | |
| 9_V1M | | | | | | | | | | | | | |
| CHD8- | CHD8- | 0 | 0 | 0 | 12-1*01 | CVVNVDNAG | | | 7-9*01 | CASSLETGG | | | 3030 |
| KLN_P7A | KLN | | | | | NMLTF | | | | WETQYF | | | 3509 |
| TRPC1- | TRPC1- | 0 | 0 | 0 | | | | | 12-3*01, | CASSLNMNT | | | 3510 |
| MLL_Q5H | MLL | | | | | | | | 12-4*01 | EAFF | | | |
| IGF1- | HBZ-KLS | 0 | 0 | 0 | | | | | 5-1*01 | CASSIDRTV | | | 3511 |
| TMS_S4F | | | | | | | | | | GNTIYF | | | |
| GALC- | GALC- | DRAM1- | 0 | 0 | | | | | | | | | |
| YVV_V3L | YVV | FII_I3F | | | | | | | | | | | |
| GABRG3- | GABRG3- | 0 | 0 | 0 | 29/ | CAARLYGGS | | | 20-1*01 | CSARDWGY | | | 3031 |
| TAM_L5I | TAM | | | | DV5*01 | QGNLIF | | | | EQYF | | | 3512 |
| HAUS3- | HAUS3- | 0 | 0 | 0 | | | | | | | | | |
| ILN_T7A | ILN | | | | | | | | | | | | |
| OR6F1- | OR6F1- | 0 | 0 | 0 | | | | | | | | | |
| VLN_T8M | VLN | | | | | | | | | | | | |
| 0 | 0 | 0 | 0 | 0 | | | | | | | | | |
| GABRG3- | GABRG3- | 0 | 0 | 0 | | | | | | | | | |
| TAM_L5I | TAM | | | | | | | | | | | | |
| 0 | 0 | 0 | 0 | 0 | 12-2*01 | CAVNEGGTS | | | 27*01 | CASSFGSGG | | | 3032 |
| | | | | | | YGKLTF | | | | ALYF | | | 3513 |
| TRPC1- | 0 | 0 | 0 | 0 | | | | | | | | | |
| MLL_Q5H | | | | | | | | | | | | | |
| HTR1F- | 0 | 0 | 0 | 0 | | | | | | | | | |
| 10_V1M | | | | | | | | | | | | | |
| TRIM16- | 0 | 0 | 0 | 0 | 8-1*01 | CAVFTGGGN | 12-2*01 | CAVRSGA | 7-2*01 | CASSFLLYN | | | 3033 |
| RMA_R1T | | | | | | KLTF | | GSYQLTF | | EQFF | | | 3450 |
| | | | | | | | | | | | | | 3514 |
| IL17RA- | IL17RA- | 0 | 0 | 0 | 12-3*01 | CAISMDTGR | | | 6-1*01 | CASSEMDGS | | | 3034 |
| FIT_TM | FIT | | | | | RALTF | | | | NQPQHF | | | 3515 |
| BAIAP3- | BAIAP3- | 0 | 0 | 0 | 12-2*01 | CAVRLVGGT | | | 29-1*01 | CSVRLTDYN | | | 3035 |
| ILN_V6I | ILN | | | | | SYGKLTF | | | | EQFF | | | 3516 |
| HAUS3- | 0 | 0 | 0 | 0 | | | | | | | | | |
| ILN_T7A | | | | | | | | | | | | | |
| SHROOM2- | SHROOM2- | 0 | 0 | 0 | 17*01 | CATLGDNDM | | | | | | | 3036 |
| KLL D6V | KLL | | | | | RF | | | | | | | |
| OR5M3- | CELSR1- | 0 | 0 | 0 | 14/ | CAMREGWG | | | 9*01 | CASSGSGAS | | | 3037 |
| KMV_T8N | YLF_F3L | | | | DV4*01 | DMRF | | | | TDTQYF | | | 3517 |
| 0 | 0 | 0 | 0 | 0 | | | | | | | | | |
| 0 | 0 | 0 | 0 | 0 | 19*01 | CALSGFGMD | | | | | | | 3038 |
| | | | | | | SSYKLIF | | | | | | | |
| GALC- | GALC- | 0 | 0 | 0 | 27*01 | CAGIGAGSY | | | | | | | 3039 |
| YVV_V3L | YVV | | | | | QLTF | | | | | | | |
| SMOX- | AKAP13- | 0 | 0 | 0 | 24*01 | CAFLMDSSY | | | 27*01 | CASSLGPGG | | | 3040 |
| KLA_KN | KLM | | | | | KLIF | | | | ASYTF | | | 3518 |
| HTR1F- | HTR1F-9 | 0 | 0 | 0 | | | | | 25-1*01 | CASSETSLFT | | | 3519 |
| 9_V1M | | | | | | | | | | HGYTF | | | |
| SLC15A2- | HAUS3- | 0 | 0 | 0 | 24*01 | CAFIGYGGS | 29/ | CASHGSS | 30*01 | CAWSSSVNT | | | 3041 |
| ILG | ILN_T7A | | | | | QGNLIF | DV5*01 | NTGKLIF | | EAFF | | | 3451 |
| | | | | | | | | | | | | | 3520 |
| FNDC3B- | FNDC3B- | 0 | 0 | 0 | 20*01 | CAVLTSGYS | | | 13*01 | CASSPMTGA | | | 3042 |
| VVL_L3M | VVL | | | | | TLTF | | | | EQFF | | | 3521 |
| HTR1F- | SEC24A- | SEC24A- | CNKSR1- | 0 | 24*01 | CAFIIQGAQ | | | 7-6*01 | CASSLGGLV | | | 3043 |
| 10_V1M | FLY | FLY_P5L | SLA_A9V | | | KLVF | | | | YNEQFF | | | 3522 |
| NSDHL- | 0 | 0 | 0 | 0 | | | | | | | | | |
| ILT_A9V | | | | | | | | | | | | | |
| 0 | 0 | 0 | 0 | 0 | 21*01 | CAVNSGYST | | | 27*01 | CASSFSGGN | | | 3044 |
| | | | | | | LTF | | | | EQFF | | | 3523 |
| 0 | 0 | 0 | 0 | 0 | | | | | 19*01 | CASTSGAYN | | | 3524 |
| | | | | | | | | | | EQFF | | | |
| HTR1F- | HTR1F-9 | DOLPP1- | 0 | 0 | 23/ | CAATEGGHN | | | 6-5*01 | CASSYQTGP | | | 3045 |
| 9_V1M | | GLM | | | DV6*01 | YGQNFVF | | | | YSNQPQHF | | | 3525 |
| HCV- | HCV- | 0 | 0 | 0 | | | | | | | | | |
| KLV(APC) | KLV(PE) | | | | | | | | | | | | |
| KCNB2- | 0 | 0 | 0 | 0 | 26-1*01 | CIVSPGGYQ | | | 27*01 | CASSWVGGA | | | 3046 |
| LLA_P6T | | | | | | KVTF | | | | DTQYF | | | 3526 |
| SLC16A7- | HTR1F- | 0 | 0 | 0 | 1-2*01 | CAVNGGDKI | | | 4-1*01 | CASSQDLGT | | | 3047 |
| AMA_P6L | 9_V1M | | | | | IF | | | | GNTIYF | | | 3527 |
| GALC- | 0 | 0 | 0 | 0 | | | | | | | | | |
| YVV_V3L | | | | | | | | | | | | | |
| 0 | 0 | 0 | 0 | 0 | 14/ | CAMRERGSY | | | | | | | 3048 |
| | | | | | DV4*01 | AGGTSYGKL | | | | | | | |
| | | | | | | TF | | | | | | | |
| CNKSR1- | 0 | 0 | 0 | 0 | 12-2*01 | CAVNKANDY | | | 20-1*01 | CSASDSLTI | | | 3049 |
| SLA_A9V | | | | | | KLSF | | | | SGFF | | | 3528 |
| 0 | 0 | 0 | 0 | 0 | 12-2*01 | CAVTADGQK | | | 5-5*01 | CASSLLGQT | | | 3050 |
| | | | | | | LLF | | | | NYGYTF | | | 3529 |
| NSDHL- | NSDHL- | 0 | 0 | 0 | 3*01 | CAVRDDNNN | | | 2*01 | CASSEGQGR | | | 3051 |
| ILT_A9V | ILT | | | | | DMRF | | | | WYEQYF | | | 3530 |
| NSDHL- | 0 | 0 | 0 | 0 | 19*01 | CALSEANTG | | | 9*01 | CASSVGSTE | | | 3052 |
| ILT_A9V | | | | | | GFKTIF | | | | AFF | | | 3531 |
| OR5M3- | OR5M3- | 0 | 0 | 0 | 14/ | CAMREGDRN | | | 4-2*01 | CASSPWEMN | | | 3053 |
| KMV | KMV_T8N | | | | DV4*01 | QFYF | | | | TEAFF | | | 3532 |
| VN1R5- | 0 | 0 | 0 | 0 | 14/ | CAMREAPEN | | | 20-1*01 | CSASVSGGP | | | 3054 |
| MII_S7Y | | | | | DV4*01 | GGTSYGKLT | | | | LDTQYF | | | 3533 |
| | | | | | | F | | | | | | | |
| BAIAP3- | BAIAP3- | 0 | 0 | 0 | 20*01 | CAVRSNDYK | | | 28*01 | CASSLGPME | | | 3055 |
| ILN | ILN_V6I | | | | | LSF | | | | ENIQYF | | | 3534 |
| HTR1F-10 | C17orf75- | C17orf75- | 0 | 0 | 10*01 | CVVRGGYNK | | | 5-4*01 | CASSSDRGE | | | 3056 |
| | ALS_V7A | ALS | | | | LIF | | | | QFF | | | 3535 |
| OR6F1- | C15orf32- | ZDHHC7- | 0 | 0 | | | | | | | | | |
| VLN_T8M | MLS_G9R | SLL | | | | | | | | | | | |
| 0 | 0 | 0 | 0 | 0 | | | | | | | | | |
| 0 | 0 | 0 | 0 | 0 | 5*01 | CAETGAGN | 12-2*01 | CAGDSWG | | | | | 3057 |
| | | | | | | MLTF | | KLQF | | | | | 3452 |
| HAUS3- | VN1R2- | 0 | 0 | 0 | | | | | | | | | |
| ILN_T7A | LML_L3F | | | | | | | | | | | | |
| ST6GALNAC2- | ST6GALNAC2- | KCNB2- | PHKA2- | 0 | 12-3*01 | CAFYDYKLS | | | 6-1*01 | CASSEVEGP | | | 3058 |
| LLF_Y6H | LLF | LLA_P6T | LLS_SF | | | F | | | | GELFF | | | 3536 |
| C3orf58- | C3orf58- | 0 | 0 | 0 | | | | | 27*01 | CASSLSGFG | | | 3537 |
| LMV | LMV_L4P | | | | | | | | | NTIYF | | | |
| TRIM58- | TRIM58- | 0 | 0 | 0 | 19*01 | CALSDPYSS | | | 14*01 | CASSQGGQD | | | 3059 |
| VLA | VLA_V1F | | | | | ASKIIF | | | | GHGTTNEKL | | | 3538 |
| | | | | | | | | | | FF | | | |
| IGF1- | IGF1-TMS | 0 | 0 | 0 | 14/ | CAMREGQD | | | 11-2*01 | CASSLGGGG | | | 3060 |
| TMS_S4F | | | | | DV4*01 | ARLMF | | | | PQETQYF | | | 3539 |
| PXDNL- | PXDNL- | 0 | 0 | 0 | 38-2/ | CARPEAGN | | | 10-2*01 | CATSRTDIS | | | 3061 |
| SIL_S1F | SIL | | | | DV8*01 | MLTF | | | | YEQYF | | | 3540 |
| TBX3- | TBX3- | 0 | 0 | 0 | | | | | 6-5*01 | CASSYYGTT | | | 3541 |
| GMG_T8M | GMG | | | | | | | | | DEQYF | | | |
| CNKSR1- | NOS1-FID | CNKSR1- | 0 | 0 | 17*01 | CATDEANFG | 17*01 | CARPPDD | 4-2*01 | CASSLGPSL | | | 3062 |
| SLA_A9V | | SLA | | | | NEKLTF | | YKLSF | | YEQYF | | | 3453 |
| | | | | | | | | | | | | | 3542 |
| MRM1- | 0 | 0 | 0 | 0 | 12-2*01 | CAVREGFKTI | | | 11-2*01 | CASSWGSSP | | | 3063 |
| 9_T6P | | | | | | F | | | | AETQYF | | | 3543 |
| DRAM1- | OR1G1- | 0 | 0 | 0 | | | | | 18*01 | CASSDQGAL | | | 3544 |
| FII_I3F | FLF | | | | | | | | | SSYEQYF | | | |
| RYR3-VLN | RYR3- | 0 | 0 | 0 | 12-1*01 | CGRTDSWG | | | 6-1*01 | CASSRIANN | | | 3064 |
| | VLN_E6K | | | | | KLQF | | | | NNEQFF | | | 3545 |
| OR5M3- | OR5M3- | 0 | 0 | 0 | 38-2/ | CAYRKENND | | | | | | | 3065 |
| KMV | KMV_T8N | | | | DV8*01 | MRF | | | | | | | |
| HERC1- | HERC1- | 0 | 0 | 0 | | | | | 29-1*01 | CSVPVFGRG | | | 3546 |
| SLL_PS | SLL | | | | | | | | | TGELFF | | | |
| HTR1F- | NBPF24- | SLC1A2- | 0 | 0 | | | | | 5-1*01 | CASSLWGTY | | | 3547 |
| 9_V1M | LLD_E6G | YMS_S3P | | | | | | | | NEQFF | | | |
| TRPV3- | HTR1F-10 | 0 | 0 | 0 | | | | | | | | | |
| LLL_A8V | | | | | | | | | | | | | |
| HTR1F- | 0 | 0 | 0 | 0 | | | | | 4-1*01 | CASSQADHY | | | 3548 |
| 10_V1M | | | | | | | | | | EQYF | | | |
| 0 | 0 | 0 | 0 | 0 | 12-2*01 | CAVIAGGFK | | | 27*01 | CASSLFNEQ | | | 3066 |
| | | | | | | TIF | | | | FF | | | 3549 |
| BTBD1- | BTBD1- | 0 | 0 | 0 | 8-3*01 | CAVGRRNS | | | | | | | 3067 |
| FML_LI | FML | | | | | GGYQKVTF | | | | | | | |
| OR5M3- | GABRG3- | 0 | 0 | 0 | 17*01 | CATFPMKTS | | | | | | | 3068 |
| KMV | TAM_L5I | | | | | YDKVIF | | | | | | | |
| OVOL1- | OVOL1- | 0 | 0 | 0 | | | | | | | | | |
| SLL_L9V | SLL | | | | | | | | | | | | |
| NSDHL- | 0 | 0 | 0 | 0 | | | | | | | | | |
| ILT_A9V | | | | | | | | | | | | | |
| HBZ-KLS | HBZ- | 0 | 0 | 0 | 1-2*01 | CAVGLGGGY | | | 27*01 | CASSFGGAS | | | 3069 |
| | KLS_A7T | | | | | NKLIF | | | | EAFF | | | 3550 |
| 0 | 0 | 0 | 0 | 0 | 12-2*01 | CAVNEERTD | | | 9*01 | CASSVGNTE | | | 3070 |
| | | | | | | KLIF | | | | AFF | | | 3551 |
| HBZ-KLS | HBZ- | 0 | 0 | 0 | 1-2*01 | CAVASGGYN | | | | | | | 3071 |
| | KLS_A7T | | | | | KLIF | | | | | | | |
| HAUS3- | 0 | 0 | 0 | 0 | | | | | | | | | |
| ILN_T7A | | | | | | | | | | | | | |
| BAIAP3- | 0 | 0 | 0 | 0 | | | | | | | | | |
| ILN_V6I | | | | | | | | | | | | | |
| HTR1F- | 0 | 0 | 0 | 0 | | | | | 6-5*01 | CASSPILTYE | | | 3552 |
| 9_V1M | | | | | | | | | | QYF | | | |
| TBX3- | 0 | 0 | 0 | 0 | 38-2/ | CAYRSGEYG | | | 19*01 | CASSMAGSS | | | 3072 |
| GMG_T8M | | | | | DV8*01 | NKLVF | | | | YEQYF | | | 3553 |
| 0 | 0 | 0 | 0 | 0 | | | | | | | | | |
| TRIM16- | GLRA1- | 0 | 0 | 0 | 25*01 | CAGNDYKLS | | | 12-3*01, | CASSLAQSD | | | 3073 |
| RMA | LIF_F6L | | | | | F | | | 12-4*01 | SLAFF | | | 3554 |
| HTR1F- | 0 | 0 | 0 | 0 | | | | | 27*01 | CASSLQGSD | | | 3555 |
| LVM_V2M | | | | | | | | | | NEQFF | | | |
| BCL9L- | 0 | 0 | 0 | 0 | 19*01 | CALSDPNDY | | | | | | | 3074 |
| FVY_T6I | | | | | | KLSF | | | | | | | |
| 0 | 0 | 0 | 0 | 0 | | | | | 20-1*01 | CSARDLTVA | | | 3556 |
| | | | | | | | | | | ETQYF | | | |
| HAUS3- | VN1R5- | HAUS3- | MAR11- | 0 | 12-2*01 | CAVYSGGGA | | | 6-5*01 | CASSSGGA | | | 3075 |
| ILN_T7A | MII_S7Y | ILN | 9_F1L | | | DGLTF | | | | WYTF | | | 3557 |
| BAIAP3- | PELP1- | MAR11- | HAUS3- | USP28- | | | | | 2*01 | CASSPRGVG | | | 3558 |
| ILN_V6I | LVL_L3F | 9_F1L | ILN | LII_C5F | | | | | | TEAFF | | | |
| NSDHL- | NSDHL- | 0 | 0 | 0 | 14/ | CAMREGLSN | | | 4-1*01 | CASSPSSGG | | | 3076 |
| ILT_A9V | ILT | | | | DV4*01 | YGGSQGNLI | | | | ITDTQYF | | | 3559 |
| | | | | | | F | | | | | | | |
| VN1R2- | 0 | 0 | 0 | 0 | | | | | 6-1*01 | CASSEQGGE | | | 3560 |
| LML_L3F | | | | | | | | | | RRNTEAFF | | | |
| RYR3- | ITIH6- | ITIH6- | 0 | 0 | 29/ | CAASGGGA | 38-1*01 | CAFMKQS | | | | | 3077 |
| VLN_E6K | RLG_G3V | RLG | | | DV5*01 | QKLVF | | YRDDKIIF | | | | | 3454 |
| 0 | 0 | 0 | 0 | 0 | 40*01 | CLLGGSNYK | | | | | | | 3078 |
| | | | | | | LTF | | | | | | | |
| ITIH6- | 0 | 0 | 0 | 0 | 14/ | CAMRAGYNT | | | 4-1*01 | CASSQGWG | | | 3079 |
| RLG_G3V | | | | | DV4*01 | DKLIF | | | | VETQYF | | | 3561 |
| PHKA2- | PHKA2- | 0 | 0 | 0 | 12-2*01 | CAVGSQGNL | 12-1 | VLFRMLTF | 6-5*01 | CASSYSTGG | | | 3080 |
| LLS_SF | LLS | | | | | IF | | | | TDTQYF | | | 3455 |
| | | | | | | | | | | | | | 3562 |
| 0 | 0 | 0 | 0 | 0 | 21*01 | CAVSGYSTL | | | 19*01 | CASSRTQGY | | | 3081 |
| | | | | | | TF | | | | SNQPQHF | | | 3563 |
| BAIAP3- | BAIAP3- | 0 | 0 | 0 | 5*01 | CAEIPRSPM | | | 28*01 | CASSIFTRRG | | | 3082 |
| ILN_V6I | ILN | | | | | FSGGYNKLI | | | | YEQYF | | | 3564 |
| | | | | | | F | | | | | | | |
| TRIM58- | OR5K2- | TRIM58- | 0 | 0 | 5*01 | CAETLYNQG | | | 9*01 | CASSGRQGI | | | 3083 |
| YMV_V3F | YIF | YMV | | | | GKLIF | | | | DTEAFF | | | 3565 |
| 0 | 0 | 0 | 0 | 0 | 8-2*01 | CVVERGSTL | | | 30*01 | CAWIDFLGQ | | | 3084 |
| | | | | | | GRLYF | | | | MNTEAFF | | | 3566 |
| ST6GALNAC2- | ST6GALNAC2- | MAR11- | 0 | 0 | 12-3*01 | CAMGDARL | | | 15*01 | CATSGTGGT | | | 3085 |
| LLF_Y6H | LLF | 9_F1L | | | | MF | | | | GELFF | | | 3567 |
| PIGN- | 0 | 0 | 0 | 0 | 12-2*01 | CAVLNSGGY | | | 6-2*01, | CASSLSYEQ | | | 3086 |
| FLT_P7H | | | | | | QKVTF | | | 6-3*01 | YF | | | 3568 |
| DHX33- | DHX33- | 0 | 0 | 0 | | | | | | | | | |
| LLA_M4I | LLA | | | | | | | | | | | | |
| FNDC3B- | FNDC3B- | 0 | 0 | 0 | 8-6*01 | CAVTDNNAG | | | 7-3*01 | CASSFGPGY | | | 3087 |
| VVL_L3M | VVL | | | | | NMLTF | | | | EQYF | | | 3569 |
| OR5M3- | OR5M3- | 0 | 0 | 0 | | | | | | | | | |
| KMV_T8N | KMV | | | | | | | | | | | | |
| C15orf32- | PHKA2- | 0 | 0 | 0 | | | | | 6-6*01 | CASSYARDR | | | 3570 |
| MLS_G9R | LLS_SF | | | | | | | | | NTEAFF | | | |
| BTBD1- | BTBD1- | 0 | 0 | 0 | 6*01 | CALDILISG | | | 30*01 | CAGWDRTP | | | 3088 |
| FML_LI | FML | | | | | GSYIPTF | | | | YEQYF | | | 3571 |
| BTBD1- | BTBD1- | 0 | 0 | 0 | 19*01 | CALSSPTYN | | | 2*01 | CASSEDAGN | | | 3089 |
| FML_LI | FML | | | | | NNDMRF | | | | YGYTF | | | 3572 |
| 0 | 0 | 0 | 0 | 0 | 24*01 | CAFESGGGA | | | | | | | 3090 |
| | | | | | | DGLTF | | | | | | | |
| OR5M3- | 0 | 0 | 0 | 0 | | | | | 6-1*01 | CASSEIQAFE | | | 3573 |
| KMV_T8N | | | | | | | | | | ETQYF | | | |
| PXDNL- | PXDNL- | 0 | 0 | 0 | 12-2*01 | CAVRGGND | 3*01F | CAGFGNV | 28*01 | CASSLFARG | | | 3091 |
| SIL_S1F | SIL | | | | | MRF | | LHC | | GPTDTQYF | | | 3456 |
| | | | | | | | | | | | | | 3574 |
| TRPV4- | ST6GALNAC2- | TRPV4- | 0 | 0 | 12-2*01 | CAVNTRTAL | | | 19*01 | CASSFGSGN | | | 3092 |
| FMI | LLF_Y6H | FMI_A6T | | | | IF | | | | TIYF | | | 3575 |
| GALC- | GALC-YVV | 0 | 0 | 0 | 38-2/ | CACMDSNY | | | 7-9*01 | CASSPHSGG | | | 3093 |
| YVV_V3L | | | | | DV8*01 | QLIW | | | | DPRNEQFF | | | 3576 |
| 0 | 0 | 0 | 0 | 0 | 8-4*01 | CAVTLTGGG | | | | | | | 3094 |
| | | | | | | NKLTF | | | | | | | |
| APBB2- | RYR3- | ZDHHC17- | 0 | 0 | | | | | | | | | |
| VQY_L7F | VLN_E6K | LLL_T4I | | | | | | | | | | | |
| NSDHL- | NSDHL- | 0 | 0 | 0 | 14/ | CAMRELSGN | 41*01 | CAVEGSRL | 9*01 | CASSVGGGH | | | 3095 |
| ILT_A9V | ILT | | | | DV4*01 | YGGSQGNLI | | TF | | QPQHF | | | 3025 |
| | | | | | | F | | | | | | | 3577 |
| CLCN4- | CLCN4- | 0 | 0 | 0 | 12-3*01 | CAMSVPGYS | | | 2*01 | CANGQGDY | | | 3096 |
| LLA_G8V | LLA | | | | | TLTF | | | | EQYF | | | 3578 |
| NSDHL- | 0 | 0 | 0 | 0 | | | | | | | | | |
| ILT_A9V | | | | | | | | | | | | | |
| PLXNB1- | PLXNB1- | 0 | 0 | 0 | | | | | | | | | |
| VLF_V1L | VLF | | | | | | | | | | | | |
| CNKSR1- | CNKSR1- | 0 | 0 | 0 | 14/ | CAMREGNT | | | 19*01 | CASSETSGLI | | | 3097 |
| SLA_A9V | SLA | | | | DV4*01 | GGFKTIF | | | | DEKLFF | | | 3579 |
| KCNC3- | KCNC3- | EXOC3L4- | 0 | 0 | | | | | 7-9*01 | CASSLAYRP | | | 3580 |
| FLP_A7V | FLP | ILL_V9I | | | | | | | | YEQYF | | | |
| SLC1A2- | SLC1A2- | DRAM1- | 0 | 0 | | | | | 2*01 | CASSWTGDS | | | 3581 |
| YMS_S3P | YMS | FII_I3F | | | | | | | | NQPQHF | | | |
| OVOL1- | OVOL1- | 0 | 0 | 0 | 12-2*01 | CAVNAPGTY | | | 12-3*01, | CASSPPDQV | | | 3098 |
| SLL_L9V | SLL | | | | | KYIF | | | 12-4*01 | YNEQFF | | | 3582 |
| STOX1- | STOX1- | 0 | 0 | 0 | 41*01 | CAVSYDSNY | | | 7-9*01 | CASSSNIWS | | | 3099 |
| RLM_M3I | RLM | | | | | QLIW | | | | PDTQYF | | | 3583 |
| 0 | 0 | 0 | 0 | 0 | 8-3*01 | CAVGARNTG | | | 12-3*01, | CASSPWDSS | | | 3100 |
| | | | | | | FQKLVF | | | 12-4*01 | GELFF | | | 3584 |
| HCV- | HCV- | 0 | 0 | 0 | | | | | 3-1*01 | CASSYYSGQ | | | 3585 |
| KLV(APC) | KLV(PE) | | | | | | | | | GNEKLFF | | | |
| 0 | 0 | 0 | 0 | 0 | 12-2*01 | CAAATGGGN | 9-2*01 | CALTASNQ | 27*01 | CASSLGGHQ | | | 3101 |
| | | | | | | KLTF | | AGTALIF | | PQHF | | | 3457 |
| | | | | | | | | | | | | | 3586 |
| BAIAP3- | BAIAP3- | 0 | 0 | 0 | | | | | 13*01 | CASTESSYN | | | 3587 |
| ILN_V6I | ILN | | | | | | | | | EQFF | | | |
| ITIH6- | ITIH6- | 0 | 0 | 0 | 12-2*01 | CAVKGGSQ | | | 9*01 | CASSVQSTD | | | 3102 |
| RLG_G3V | RLG | | | | | GNLIF | | | | TQYF | | | 3588 |
| 0 | 0 | 0 | 0 | 0 | 41*01 | CAVRPTSPY | | | | | | | 3103 |
| | | | | | | GGSQGNLIF | | | | | | | |
| 0 | 0 | 0 | 0 | 0 | | | | | 13*01 | CASSSTVGV | | | 3589 |
| | | | | | | | | | | RDYHSGNTI | | | |
| | | | | | | | | | | YF | | | |
| 0 | 0 | 0 | 0 | 0 | 12-2*01 | CAVKGTDKLI | | | 2*01 | CASTDLSDT | | | 3104 |
| | | | | | | F | | | | QYF | | | 3590 |
| 0 | 0 | 0 | 0 | 0 | | | | | | | | | |
| GALC- | GALC- | 0 | 0 | 0 | 6*01 | CALGTHDMR | | | 10-1*01 | CASSESGAA | | | 3105 |
| YVV_V3L | YVV | | | | | F | | | | YTGELFF | | | 3591 |
| 0 | 0 | 0 | 0 | 0 | | | | | 3-1*01 | CATERGFRT | | | 3592 |
| | | | | | | | | | | DTQYF | | | |
| OVOL1- | OVOL1- | 0 | 0 | 0 | 41*01 | CAVEGSRLT | | | | | | | 3025 |
| SLL_L9V | SLL | | | | | F | | | | | | | |
| 0 | 0 | 0 | 0 | 0 | | | | | 6-5*01 | CASSYEQGP | | | 3593 |
| | | | | | | | | | | YEQYF | | | |
| 0 | 0 | 0 | 0 | 0 | | | | | 3-1*01 | CASSQAYGG | | | 3594 |
| | | | | | | | | | | DSSYEQYF | | | |
| PHKA2- | KCNB2- | 0 | 0 | 0 | | | | | | | | | |
| LLS_SF | LLA_P6T | | | | | | | | | | | | |
| 0 | 0 | 0 | 0 | 0 | 1-2*01 | CARMSTDS | | | 2*01 | CASGRSGGV | | | 3106 |
| | | | | | | WGKLQF | | | | GRNGYTF | | | 3595 |
| DHX33- | 0 | 0 | 0 | 0 | | | | | 9*01 | CASALGSGG | | | 3596 |
| LLA_K5T | | | | | | | | | | AYEQFF | | | |
| CELSR1- | NOS1- | MRGPRF- | 0 | 0 | 8-6*01 | CAAFMFSGG | | | 27*01 | CASTLGQGN | | | 3107 |
| YLF_F3L | FID_D3Y | RLW_R1W | | | | YNKLIF | | | | TEAFF | | | 3597 |
| 0 | 0 | 0 | 0 | 0 | | | | | 3-1*01 | CASSQDTGS | | | 3598 |
| | | | | | | | | | | GNTIYF | | | |
| PHKA2- | 0 | 0 | 0 | 0 | 12-1*01 | CVVSNQAGT | | | 4-2*01 | CASSQGPGT | | | 3108 |
| LLS_SF | | | | | | ALIF | | | | GFEGYTF | | | 3599 |
| 0 | 0 | 0 | 0 | 0 | 21*01 | CAVRFNTGF | | | 27*01 | CASRRGPTD | | | 3109 |
| | | | | | | QKLVF | | | | TQYF | | | 3600 |
| KIF20B- | OR8B8- | A2ML1- | A2ML1- | 0 | 25*01 | CAGRGMVG | | | 2*01 | CASSALAGG | | | 3110 |
| YTS_S6L | YVN | YLD_K7R | YLD_WT | | | NKLVF | | | | YNEQFF | | | 3601 |
| CNKSR1- | CNKSR1- | 0 | 0 | 0 | 4*01 | CLIRDDKII | | | 20-1*01 | CSAPKEEPY | | | 3111 |
| SLA_A9V | SLA | | | | | F | | | | GYTF | | | 3602 |
| HTR1F- | 0 | 0 | 0 | 0 | 10*01 | CVVMPPGS | 1-2*01 | CAVTVVDN | 27*01 | CASSLTGSA | | | 3112 |
| 9_V1M | | | | | | GYSTLTF | | NARLMF | | EAFF | | | 3458 |
| | | | | | | | | | | | | | 3603 |
| ATP6AP1- | HCV- | HCV- | 0 | 0 | | | | | | | | | |
| KLG_G3W | KLV(APC) | KLV(PE) | | | | | | | | | | | |
| HTR1F- | OR5M3- | 0 | 0 | 0 | 14/ | CAMRETDSS | 8-6*01 | CAVTPNFN | 29-1*01 | CSVERGGDE | | | 3113 |
| 10_V1M | KMV | | | | DV4*01 | YKLIF | | KFYF | | QFF | | | 3459 |
| | | | | | | | | | | | | | 3604 |
| 0 | 0 | 0 | 0 | 0 | 17*01 | CATGGPDM | | | 6-2*01, | CASSYSISG | | | 3114 |
| | | | | | | RF | | | 6-3*01 | QGGETQYF | | | 3605 |
| DHX33- | DHX33- | DHX33- | HCV- | 0 | | | | | 7-8*01 | CASSGRQGS | | | 3606 |
| LLA_K5T | LLA_M4I | LLA | KLV(APC) | | | | | | | YEQYF | | | |
| OR2T1- | OR2T1- | 0 | 0 | 0 | 19*01 | CALKNLGNY | | | 20-1*01 | CSAPSYREL | | | 3115 |
| FLN_F5L | FLN | | | | | GQNFVF | | | | AGAYLQETQ | | | 3607 |
| | | | | | | | | | | YF | | | |
| BAIAP3- | BAIAP3- | 0 | 0 | 0 | 20*01 | CAVQAGNTD | 4*01 | CLVGDLTS | 20-1*01 | CSARTWTGN | | | 3116 |
| ILN_V6I | ILN | | | | | KLIF | | FQGAQKL | | TIYF | | | 3460 |
| | | | | | | | | VF | | | | | 3608 |
| HTR1F- | HTR1F-9 | 0 | 0 | 0 | 29/ | CAASANNQG | | | 12-3*01, | CASSLVAGP | | | 3117 |
| 9_V1M | | | | | DV5*01 | GKLIF | | | 12-4*01 | YSQETQYF | | | 3609 |
| 0 | 0 | 0 | 0 | 0 | | | | | 13*01 | CASSPRTGV | | | 3610 |
| | | | | | | | | | | GEQYF | | | |
| ITIH6- | PIGN- | 0 | 0 | 0 | | | | | | | | | |
| RLG_G3V | FLT_P7H | | | | | | | | | | | | |
| PHKA2- | PHKA2- | 0 | 0 | 0 | 12-1*01 | CVVGPGANN | 9-2*01 | CALSMYS | 12-3*01, | CASSFRQTL | | | 3118 |
| LLS_SF | LLS | | | | | LFF | | GGGADGL | 12-4*01 | AVYEQYF | | | 3610 |
| | | | | | | | | TF | | | | | 3611 |
| GCN1L1-9 | APBB2- | GPR174- | 0 | 0 | | | | | | | | | |
| | VQY | FSF | | | | | | | | | | | |
| C17orf75- | 0 | 0 | 0 | 0 | 12-2*01 | CAVSTGGGA | | | 5-4*01 | CASSLGQEIP | | | 3119 |
| ALS_V7A | | | | | | DGLTF | | | | YYGYTF | | | 3612 |
| CHD8- | 0 | 0 | 0 | 0 | | | | | | | | | |
| KLN_P7A | | | | | | | | | | | | | |
| BAIAP3- | BAIAP3- | 0 | 0 | 0 | 26-1*01 | CIVRVAGQF | | | 11-2*01 | CASSSQGGA | | | 3120 |
| ILN_V6I | ILN | | | | | YF | | | | KNEQYF | | | 3613 |
| PRSS16- | OR10A3- | 0 | 0 | 0 | 5*01 | CAETPNDYK | 1-2*01 | CAVRDYY | 28*01 | CASSLVGAD | | | 3121 |
| LLL_L1Q | ILI | | | | | LSF | | QLIW | | RSGELFF | | | 3462 |
| | | | | | | | | | | | | | 3614 |
| 0 | 0 | 0 | 0 | 0 | | | | | | | | | |
| IL17RA- | 0 | 0 | 0 | 0 | | | | | | | | | |
| FIT_TM | | | | | | | | | | | | | |
| 0 | 0 | 0 | 0 | 0 | | | | | | | | | |
| DHX33- | HTR1F- | 0 | 0 | 0 | | | | | | | | | |
| LLA_K5T | LVM_V2M | | | | | | | | | | | | |
| HBZ- | GABRG3- | GABRG3- | OR8B8- | 0 | 38-1*01 | CAFDFSSGS | | | 19*01 | CASSYGQPN | | | 3122 |
| KLS_A7T | YVT | YVT_L7I | YVN_V2L | | | ARQLTF | | | | TEAFF | | | 3615 |
| GABRG3- | GABRG3- | 0 | 0 | 0 | 12-2*01 | CAVNRLVF | | | | | | | 3123 |
| YVT_L7I | YVT | | | | | | | | | | | | |
| 0 | 0 | 0 | 0 | 0 | 12-2*01 | CAVTKNTGN | | | 20-1*01 | CSARTGNTN | | | 3124 |
| | | | | | | QFYF | | | | EQFF | | | 3616 |
| CD47- | CD47- | 0 | 0 | 0 | | | | | | | | | |
| GLT_V6F | GLT | | | | | | | | | | | | |
| 0 | 0 | 0 | 0 | 0 | | | | | | | | | |
| CNKSR1- | CNKSR1- | 0 | 0 | 0 | 14/ | CAMSVSSND | | | 3-1*01 | CASSQGTGG | | | 3125 |
| SLA | SLA_A9V | | | | DV4*01 | YKLSF | | | | IVDIQYF | | | 3617 |
| 0 | 0 | 0 | 0 | 0 | 21*01 | CAVRLGGSY | | | 11-2*01 | CASRDILYNE | | | 3126 |
| | | | | | | IPTF | | | | QFF | | | 3618 |
| 0 | 0 | 0 | 0 | 0 | 12-3*01 | CAMSGDYKL | | | 28*01 | CASSSQSSG | | | 3127 |
| | | | | | | SF | | | | ANVLTF | | | 3619 |
| 0 | 0 | 0 | 0 | 0 | | | | | | | | | |
| TRPC1- | TRPC1- | VN1R5- | 0 | 0 | 3*01F | CGSADRGST | | | | | | | 3128 |
| MLL_Q5H | MLL | MII_S7Y | | | | LGRLYF | | | | | | | |
| 0 | 0 | 0 | 0 | 0 | | | | | 4-2*01 | CASSQMTG | | | 3620 |
| | | | | | | | | | | GGEQFF | | | |
| 0 | 0 | 0 | 0 | 0 | | | | | 11-2*01 | CASSPGGEA | | | 3621 |
| | | | | | | | | | | FF | | | |
| ITIH6- | ITIH6- | 0 | 0 | 0 | 19*01 | CALSEAEGY | | | | | | | 3129 |
| RLG_G3V | RLG | | | | | SGYALNF | | | | | | | |
| 0 | 0 | 0 | 0 | 0 | | | | | 7-9*01 | CASSLVRQE | | | 3622 |
| | | | | | | | | | | AAGELFF | | | |
| OR8B8- | 0 | 0 | 0 | 0 | | | | | | | | | |
| YVN_V2L | | | | | | | | | | | | | |
| GABRG3- | 0 | 0 | 0 | 0 | 27*01 | CAGVFGGSN | | | 9*01 | CASSGGQG | | | 3130 |
| TAM_L5I | | | | | | YKLTF | | | | WTDTQYF | | | 3623 |
| 0 | 0 | 0 | 0 | 0 | | | | | | | | | |
| VN1R5- | VN1R5- | 0 | 0 | 0 | 24*01 | CAFILVANAG | | | 12-3*01, | CASRPRQVE | | | 3131 |
| MII_S7Y | MII | | | | | KSTF | | | 12-4*01 | TQYF | | | 3624 |
| NSDHL- | NSDHL- | 0 | 0 | 0 | 14/ | CAMREVAGA | | | 10-2*01 | CASGTLNSN | | | 3132 |
| ILT | ILT_A9V | | | | DV4*01 | GNKLTF | | | | QPQHF | | | 3625 |
| TEAD1- | NSDHL- | NSDHL- | 0 | 0 | | | | | | | | | |
| VLE | ILT | ILT_A9V | | | | | | | | | | | |
| HCV- | HCV- | 0 | 0 | 0 | 38-2/ | CAYGEDDKII | | | 25-1*01 | CASRRDSSG | | | 3133 |
| KLV(APC) | KLV(PE) | | | | DV8*01 | F | | | | YTF | | | 3626 |
| 0 | 0 | 0 | 0 | 0 | | | | | | | | | |
| 0 | 0 | 0 | 0 | 0 | | | | | | | | | |
| DHX33- | 0 | 0 | 0 | 0 | 16*01 | CALRFNSSY | | | | | | | 3134 |
| LLA_K5T | | | | | | KLIF | | | | | | | |
| HTR1F- | 0 | 0 | 0 | 0 | | | | | 29-1*01 | CSVEQGGDT | | | 3627 |
| 10_V1M | | | | | | | | | | QYF | | | |
| 0 | 0 | 0 | 0 | 0 | | | | | | | | | |
| PIGN- | 0 | 0 | 0 | 0 | | | | | | | | | |
| FLT_P7H | | | | | | | | | | | | | |
| HTR1F- | 0 | 0 | 0 | 0 | 5*01 | CAESKESGG | | | 27*01 | CASSGFSNQ | | | 3135 |
| 9_V1M | | | | | | YQKVTF | | | | PQHF | | | 3628 |
| 0 | 0 | 0 | 0 | 0 | | | | | 2*01 | CATLWGTDT | | | 3629 |
| | | | | | | | | | | QYF | | | |
| 0 | 0 | 0 | 0 | 0 | | | | | 6-2*01, | CASSYIPGR | | | 3630 |
| | | | | | | | | | 6-3*01 | YEQYF | | | |
| AGXT2L2- | 0 | 0 | 0 | 0 | 14/ | CAMREPRG | | | | | | | 3136 |
| ILT_M5I | | | | | DV4*01 | GRRALTF | | | | | | | |
| 0 | 0 | 0 | 0 | 0 | 19*01 | CALRGFQDS | | | | | | | 3137 |
| | | | | | | NYQLIW | | | | | | | |
| PHKA2- | 0 | 0 | 0 | 0 | 12-2*01 | CAVTSDGQK | | | 5-4*01 | CASSLEGEK | | | 3138 |
| LLS_SF | | | | | | LLF | | | | LFF | | | 3631 |
| OR6F1- | 0 | 0 | 0 | 0 | | | | | | | | | |
| VLN_T8M | | | | | | | | | | | | | |
| 0 | 0 | 0 | 0 | 0 | | | | | | | | | |
| GALC- | 0 | 0 | 0 | 0 | | | | | | | | | |
| YVV_V3L | | | | | | | | | | | | | |
| BAIAP3- | BAIAP3- | 0 | 0 | 0 | | | | | | | | | |
| ILN_V6I | ILN | | | | | | | | | | | | |
| HTR1F- | HTR1F-9 | 0 | 0 | 0 | 26-2*01 | CILRDPYNTD | | | | | | | 3139 |
| 9_V1M | | | | | | KLIF | | | | | | | |
| 0 | 0 | 0 | 0 | 0 | | | | | | | | | |
| OR5M3- | OR5M3- | 0 | 0 | 0 | 38-2/ | CAYRTGDSG | | | 10-1*01 | CASSEFRDR | | | 3140 |
| KMV | KMV_T8N | | | | DV8*01 | AGSYQLTF | | | | NQPQHF | | | 3632 |
| 0 | 0 | 0 | 0 | 0 | | | | | 4-2*01 | CASSQGRR | | | 3633 |
| | | | | | | | | | | GGGDKNIQY | | | |
| | | | | | | | | | | F | | | |
| 0 | 0 | 0 | 0 | 0 | | | | | | | | | |
| 0 | 0 | 0 | 0 | 0 | | | | | | | | | |
| 0 | 0 | 0 | 0 | 0 | | | | | | | | | |
| 0 | 0 | 0 | 0 | 0 | | | | | | | | | |
| 0 | 0 | 0 | 0 | 0 | | | | | | | | | |
| ITIH6- | ITIH6- | 0 | 0 | 0 | | | | | 20-1*01 | CSARSEKSG | | | 3634 |
| RLG_G3V | RLG | | | | | | | | | ANVLTF | | | |
| CNKSR1- | CNKSR1- | 0 | 0 | 0 | | | | | | | | | |
| SLA_A9V | SLA | | | | | | | | | | | | |
| HCV- | HCV- | 0 | 0 | 0 | 38-1*01 | CAFIWNDYK | | | 19*01 | CASSSGGG | | | 3141 |
| KLV(PE) | KLV(APC) | | | | | LSF | | | | QPQHF | | | 3636 |
| STOX1- | STOX1- | 0 | 0 | 0 | 17*01 | CATDAEDSN | | | 27*01 | CASSSSSGD | | | 3142 |
| RLM_M3I | RLM | | | | | YQLIW | | | | EQYF | | | 3636 |
| PGM5- | 0 | 0 | 0 | 0 | | | | | | | | | |
| AVG_H5Y | | | | | | | | | | | | | |
| TBX3- | TBX3- | 0 | 0 | 0 | 14/ | CAMREAFAG | | | 10-3*01 | CAISELDWG | | | 3143 |
| GMG | GMG_T8M | | | | DV4*01 | TASKLTF | | | | VSSPLHF | | | 3637 |
| HTR1F- | HTR1F-9 | 0 | 0 | 0 | 5*01 | CAEIGVGGY | | | 6-5*01 | CATSPSLGT | | | 3144 |
| 9_V1M | | | | | | QKVTF | | | | QYF | | | 3638 |
| GABRG3- | GABRG3-YVT | 0 | 0 | 0 | | | | | | | | | |
| YVT_L7I | | | | | | | | | | | | | |
| BTBD1- | BTBD1- | 0 | 0 | 0 | | | | | | | | | |
| FML_LI | FML | | | | | | | | | | | | |
| 0 | 0 | 0 | 0 | 0 | | | | | | | | | |
| 0 | 0 | 0 | 0 | 0 | | | | | | | | | |
| OR6F1- | OR6F1- | 0 | 0 | 0 | | | | | 15*01 | CATSKTADR | | | 3639 |
| VLN_T8M | VLN | | | | | | | | | SPYEQYF | | | |
| OR6F1- | OR6F1- | 0 | 0 | 0 | 29/ | CAASGAGGT | | | 3-1*01 | CASSQEGRQ | | | 3145 |
| VLN_T8M | VLN | | | | DV5*01 | SYGKLTF | | | | GSYNEQFF | | | 3640 |
| 0 | 0 | 0 | 0 | 0 | | | | | | | | | |
| HTR1F- | 0 | 0 | 0 | 0 | 19*01 | CALSEASRD | | | 19*01 | CASRPGQVV | | | 3146 |
| 10_V1M | | | | | | FQKLVF | | | | YGYTF | | | 3641 |
| ITIH6- | 0 | 0 | 0 | 0 | | | | | 5-1*01 | CASSLKTDS | | | 3642 |
| RLG_G3V | | | | | | | | | | TPLQETQYF | | | |
| 0 | 0 | 0 | 0 | 0 | | | | | | | | | |
| SEC24A- | 0 | 0 | 0 | 0 | 38-2/ | CAYTSNDMR | | | 4-2*01 | CASSQGTSG | | | 3147 |
| FLY_P5L | | | | | DV8*01 | F | | | | TDTQYF | | | 3643 |
| PIGN- | 0 | 0 | 0 | 0 | 12-2*01 | CAVPLAGGT | | | 30*01 | CAWSWTVN | | | 3148 |
| FLT_P7H | | | | | | SYGKLTF | | | | TEAFF | | | 3644 |
| ERBB2- | 0 | 0 | 0 | 0 | 19*01 | CALSEAGYS | | | 29-1*01 | CSVVGTGSV | | | 3149 |
| ALI_H8Y | | | | | | SASKIIF | | | | ITNEKLFF | | | 3645 |
| ATP6AP1- | 0 | 0 | 0 | 0 | 35*01 | CAGLPDQTG | | | | | | | 3150 |
| KLG_G3W | | | | | | ANNLFF | | | | | | | |
| PHKA2- | 0 | 0 | 0 | 0 | | | | | | | | | |
| LLS_SF | | | | | | | | | | | | | |
| SEC24A- | 0 | 0 | 0 | 0 | 22*01 | CAVAYSGGG | | | 7-9*01 | CASSSDLRT | | | 3151 |
| FLY_P5L | | | | | | ADGLTF | | | | NYNEQFF | | | 3646 |
| SEC24A- | 0 | 0 | 0 | 0 | 12-1*01 | CVVNGNND | 41*01 | CAVEGSRL | 4-1*01 | CASSQDEGY | | | 3152 |
| FLY_P5L | | | | | | MRF | | TF | | EQYF | | | 3025 |
| | | | | | | | | | | | | | 3647 |
| OR6F1- | 0 | 0 | 0 | 0 | 12-2*01 | CAASSSNTG | | | 4-2*01 | CASSQDLNE | | | 3153 |
| VLN_T8M | | | | | | KLIF | | | | QYF | | | 3648 |
| OR10A3- | 0 | 0 | 0 | 0 | 8-6*01 | CAVSDLAGQ | | | 19*01 | CASSPVGDT | | | 3154 |
| ILI_V6F | | | | | | KLLF | | | | QYF | | | 3649 |
| PLXNB1- | 0 | 0 | 0 | 0 | 12-3*01 | CAMGDYKLS | | | | | | | 3155 |
| VLF_V1L | | | | | | F | | | | | | | |
| CLCN4- | 0 | 0 | 0 | 0 | 12-3*01 | CAMSAGNQ | | | 11-2*01 | CASSLDLAG | | | 3156 |
| LLA_G8V | | | | | | GGKLIF | | | | GFYEQYF | | | 3650 |
| 0 | 0 | 0 | 0 | 0 | 13-1*01 | CAASSPLNA | | | | | | | 3157 |
| | | | | | | GGTSYGKLT | | | | | | | |
| | | | | | | F | | | | | | | |
| CHST14- | 0 | 0 | 0 | 0 | | | | | | | | | |
| MLM_F4L | | | | | | | | | | | | | |
| DHX33- | 0 | 0 | 0 | 0 | | | | | 20-1*01 | CSARDPQGF | | | 3651 |
| LLA_M4I | | | | | | | | | | DGYTF | | | |
| PHKA2- | 0 | 0 | 0 | 0 | 41*01 | CAVEGSRLT | 12-2*01 | CAVRGGK | | | | | 3025 |
| LLS_SF | | | | | | F | | LTF | | | | | 3463 |
| IGF1- | 0 | 0 | 0 | 0 | | | | | | | | | |
| TMS_S4F | | | | | | | | | | | | | |
| KCNB2- | 0 | 0 | 0 | 0 | 12-2*01 | CAATGGSYI | | | 14*01 | CASSQAGEQ | | | 3158 |
| LLA_P6T | | | | | | PTF | | | | YF | | | 3652 |
| VN1R2- | 0 | 0 | 0 | 0 | 12-2*01 | CAVFGLSND | | | | | | | 3159 |
| LML_L3F | | | | | | YKLSF | | | | | | | |
| DHX33- | 0 | 0 | 0 | 0 | | | | | | | | | |
| LLA_M4I | | | | | | | | | | | | | |
| NOS1- | 0 | 0 | 0 | 0 | | | | | | | | | |
| FID_D3Y | | | | | | | | | | | | | |
| OR5M3- | 0 | 0 | 0 | 0 | 12-2*01 | CAVNAPDGQ | | | | | | | 3160 |
| KMV_T8N | | | | | | KLLF | | | | | | | |
| ZDHHC7- | 0 | 0 | 0 | 0 | 12-2*01 | CAVPEGNTP | | | 18*01 | CASSPYGNTI | | | 3161 |
| SLL_P7L | | | | | | LVF | | | | YF | | | 3653 |
| VN1R2- | 0 | 0 | 0 | 0 | | | | | 27*01 | CASSPPGTY | | | 3654 |
| LML_L3F | | | | | | | | | | NEQFF | | | |
| USP28- | 0 | 0 | 0 | 0 | | | | | 20-1*01 | CSVPSYNEQ | | | 3655 |
| LII_C5F | | | | | | | | | | FF | | | |
| C17orf75- | 0 | 0 | 0 | 0 | 1-2*01 | CAVVIGFGN | | | 5-1*01 | CASSTQGTG | | | 3162 |
| ALS_V7A | | | | | | VLHC | | | | VYNEQFF | | | 3656 |
| USP28- | 0 | 0 | 0 | 0 | | | | | | | | | |
| LII_C5F | | | | | | | | | | | | | |
| INTS1- | 0 | 0 | 0 | 0 | 12-2*01 | CAVNGYGNK | | | 15*01 | CATSRPTDW | | | 3163 |
| VLL_L3F | | | | | | LVF | | | | VETQYF | | | 3657 |
| WDR46- | 0 | 0 | 0 | 0 | 12-2*01 | CAVNQSGYS | | | 9*01 | CASSPTGNE | | | 3164 |
| FLT_T3I | | | | | | TLTF | | | | QFF | | | 3658 |
| OR5M3- | 0 | 0 | 0 | 0 | | | | | 6-6*01 | CASSYPSTG | | | 3659 |
| KMV_T8N | | | | | | | | | | SSYEQYF | | | |
| OR14C36- | 0 | 0 | 0 | 0 | 3*01 | CAVRDIDSN | | | 29-1*01 | CSVAGGTEA | | | 3165 |
| FML_V6L | | | | | | YQLIW | | | | FF | | | 3660 |
| OR6F1- | 0 | 0 | 0 | 0 | | | | | 20-1*01 | CSARGAFHE | | | 3661 |
| VLN_T8M | | | | | | | | | | QYF | | | |
| ATP6AP1- | 0 | 0 | 0 | 0 | | | | | | | | | |
| KLG_G3W | | | | | | | | | | | | | |
| VN1R2- | 0 | 0 | 0 | 0 | | | | | 12-3*01, | CASSIQGALT | | | 3662 |
| LML_L3F | | | | | | | | | 12-4*01 | DTQYF | | | |
| ATP6AP1- | 0 | 0 | 0 | 0 | 3*01 | CAVRDIGDN | | | 4-1*01 | CASSPSQGY | | | 3166 |
| KLG_G3W | | | | | | NDMRF | | | | GYTF | | | 3663 |
| MLL2- | 0 | 0 | 0 | 0 | | | | | | | | | |
| ALS_L8H | | | | | | | | | | | | | |
| MAR11- | 0 | 0 | 0 | 0 | 29/ | CAASESNFG | | | | | | | 3167 |
| 9_F1L | | | | | DV5*01 | NEKLTF | | | | | | | |
| SLC16A7- | 0 | 0 | 0 | 0 | | | | | | | | | |
| AMA_P6L | | | | | | | | | | | | | |
| MLL2- | 0 | 0 | 0 | 0 | 40*01 | CLLGDNNDM | 41*01 | CAVGEETS | 6-2*01, | CASSYFLEQ | | | 3168 |
| ALS_L8H | | | | | | RF | | GSRLTF | 6-3*01 | YF | | | 3464 |
| | | | | | | | | | | | | | 3664 |
| GOLGA3- | 0 | 0 | 0 | 0 | 8-3*01 | CAVGAWDS | | | 19*01 | CASSIGGQR | | | 3169 |
| SLD_P4L | | | | | | GGSNYKLTF | | | | YNEQFF | | | 3665 |
| OR14C36- | 0 | 0 | 0 | 0 | | | | | | | | | |
| FML_V6L | | | | | | | | | | | | | |
| SEC24A- | 0 | 0 | 0 | 0 | 19*01 | CALSEAGSW | | | | | | | |
| FLY_P5L | | | | | | GNTPLVF | | | | | | | |
| ZDHHC7- | 0 | 0 | 0 | 0 | | | | | | | | | |
| SLL_P7L | | | | | | | | | | | | | |
| DHX33- | 0 | 0 | 0 | 0 | | | | | | | | | |
| LLA_M4I | | | | | | | | | | | | | |
| ATP6AP1- | 0 | 0 | 0 | 0 | | | | | | | | | |
| KLG_G3W | | | | | | | | | | | | | |
| USP28- | 0 | 0 | 0 | 0 | 12-2*01 | CAVSGGYNK | | | 10-1*01 | CASSGGGA | | | 3171 |
| LII_C5F | | | | | | LIF | | | | GNEQFF | | | 3666 |
| TEAD1- | 0 | 0 | 0 | 0 | | | | | 6-1*01 | CASSEGQGY | | | 3667 |
| VLE_L8F | | | | | | | | | | EQYF | | | |
| HAUS3- | 0 | 0 | 0 | 0 | 8-4*01 | CALAGGGAD | | | 13*01 | CASSPYGQG | | | 3172 |
| ILN_T7A | | | | | | GLTF | | | | GRDTEAFF | | | 3668 |
| CD47- | 0 | 0 | 0 | 0 | 21*01 | CAVIYNFNKF | | | 2*01 | CASKSNTEA | | | 3173 |
| GLT_V6F | | | | | | YF | | | | FF | | | 3669 |
| ATP6AP1- | 0 | 0 | 0 | 0 | | | | | | | | | |
| KLG_G3W | | | | | | | | | | | | | |
| ITIH6- | 0 | 0 | 0 | 0 | | | | | | | | | |
| RLG_G3V | | | | | | | | | | | | | |
| HAUS3- | 0 | 0 | 0 | 0 | 27*01 | CAGDQNTG | | | 5-6*01 | CASSPTGSY | | | 3174 |
| ILN_T7A | | | | | | NQFYF | | | | GYTF | | | 3670 |
| PGM5- | 0 | 0 | 0 | 0 | 19*01 | CALSPRSSN | | | | | | | 3175 |
| AVG_H5Y | | | | | | TGKLIF | | | | | | | |
| TRPV3- | 0 | 0 | 0 | 0 | 21*01 | CAVKGGGA | | | 5-4*01 | CASGTELMN | | | 3176 |
| LLL_A8V | | | | | | DGLTF | | | | TEAFF | | | 3671 |
| ITIH6- | 0 | 0 | 0 | 0 | | | | | | | | | |
| RLG_G3V | | | | | | | | | | | | | |
| 0 | 0 | 0 | 0 | 0 | | | | | 25-1*01 | CASSETGYA | | | 3672 |
| | | | | | | | | | | YEQYF | | | |
| SMARCD3- | HTR1F- | GP100- | 0 | 0 | | | | | 19*01 | CATRDSQSS | | | 3673 |
| KLF_H8Y | 10_V1M | ALL | | | | | | | | YEQYF | | | |
| ATP6AP1- | 0 | 0 | 0 | 0 | 16*01 | CALSTGNQF | | | 9*01 | CASSAGQGY | | | 3177 |
| KLG_G3W | | | | | | YF | | | | EQYF | | | 3674 |
| MPV17- | 0 | 0 | 0 | 0 | 19*01 | CALKTYSNY | | | 7-9*01 | CASSLASQV | | | 3178 |
| YLW_A5P | | | | | | QLIW | | | | ETQYF | | | 3675 |
| HAUS3- | 0 | 0 | 0 | 0 | 12-2*01 | CAGFGGYQ | | | 30*01 | CAWSHSGG | | | 3179 |
| ILN_T7A | | | | | | KVTF | | | | YEQYF | | | 3676 |
| PIGN- | 0 | 0 | 0 | 0 | 12-2*01 | CAVNSNYQL | | | 20-1*01 | CSGDAFF | | | 3180 |
| FLT_P7H | | | | | | IW | | | | | | | 3677 |
| ATP6AP1- | 0 | 0 | 0 | 0 | 12-2*01 | CAVNMYGG | | | 2*01 | CASTPGTEA | | | 3181 |
| KLG_G3W | | | | | | YQKVTF | | | | FF | | | 3678 |
| INTS1- | 0 | 0 | 0 | 0 | 8-4*01 | CAVSEWDD | | | 10-2*01 | CASSDGRAD | | | 3182 |
| VLL_L3F | | | | | | MRF | | | | TQYF | | | 3679 |
| OR14C36- | 0 | 0 | 0 | 0 | | | | | | | | | |
| FML_V6L | | | | | | | | | | | | | |
| OR14C36- | 0 | 0 | 0 | 0 | 39*01 | CAVDSGGG | 27*01 | CAGADTN | 5-4*01 | CASSWLNTE | | | 3183 |
| FML_V6L | | | | | | ADGLTF | | AGKSTF | | AFF | | | 3465 |
| | | | | | | | | | | | | | 3680 |
| ATP6AP1- | 0 | 0 | 0 | 0 | 19*01 | CALSEAEGN | | | 9*01 | CASSVGGGS | | | 3184 |
| KLG_G3W | | | | | | TPLVF | | | | NQPQHF | | | 3681 |
| GANAB- | 0 | 0 | 0 | 0 | | | | | 2*01 | CASSGVAEW | | | 3682 |
| ALY_S5F | | | | | | | | | | ALETQYF | | | |
| TRPC1- | 0 | 0 | 0 | 0 | 2*01 | CAVEDRGG | | | 12-3*01, | CASRNTGTT | | | 3185 |
| MLL_Q5H | | | | | | NTGFQKLVF | | | 12-4*01 | NEKLFF | | | 3683 |
| DCHS1- | 0 | 0 | 0 | 0 | | | | | | | | | |
| TLF_I5M | | | | | | | | | | | | | |
| 0 | 0 | 0 | 0 | 0 | 17*01 | CATDLWSGA | | | 13*01 | CASSPTLAD | | | 3186 |
| | | | | | | GNMLTF | | | | EQYF | | | 3684 |
| ATP6AP1- | 0 | 0 | 0 | 0 | | | | | | | | | |
| KLG_G3W | | | | | | | | | | | | | |
| MPV17- | 0 | 0 | 0 | 0 | | | | | | | | | |
| YLW_A5P | | | | | | | | | | | | | |
| APBB2- | 0 | 0 | 0 | 0 | | | | | | | | | |
| VQY_L7F | | | | | | | | | | | | | |
| CELSR1- | SHROOM2- | 0 | 0 | 0 | 24*01 | CAPVSGGGA | 14/ | CAMREPY | 5-6*01 | CASSLPDRG | | | 3187 |
| YLF_F3L | KLL_D6V | | | | | DGLTF | DV4*01 | NAGNMLT | | GTKNIQYF | | | 3466 |
| | | | | | | | | F | | | | | 3685 |
| RYR3- | 0 | 0 | 0 | 0 | 14/ | CAMRALYYG | | | 3-1*01 | CASSLLGQS | | | 3188 |
| VLN_E6K | | | | | DV4*01 | KLTF | | | | TNEKLFF | | | 3686 |
| TRPV4- | 0 | 0 | 0 | 0 | 12-2*01 | CAVNGGWG | | | 29-1*01 | CSVDLGTEE | | | 3189 |
| FMI_A6T | | | | | | KLQF | | | | TQYF | | | 3687 |
| MPV17- | 0 | 0 | 0 | 0 | | | | | | | | | |
| YLW_A5P | | | | | | | | | | | | | |
| ATP6AP1- | 0 | 0 | 0 | 0 | | | | | | | | | |
| KLG_G3W | | | | | | | | | | | | | |
| OR14C36- | 0 | 0 | 0 | 0 | 22*01 | CAGALAFND | | | 6-4*01 | CASSPAVGT | 4-1*01 | CASSQEQ | 3190 |
| FML_V6L | | | | | | MRF | | | | GDEKLFF | | LSTYEQYF | 3688 |
| OR14C36- | IPO9- | 0 | 0 | 0 | 3*01 | CAVRDPYNF | | | | | | | 3191 |
| FML_V6L | FSS_E4D | | | | | NKFYF | | | | | | | |
| HERC1- | 0 | 0 | 0 | 0 | | | | | | | | | |
| SLL_PS | | | | | | | | | | | | | |
| A2ML1- | 0 | 0 | 0 | 0 | 27*01 | CAGARRDDK | | | 9*01 | CASSEPGPW | | | 3192 |
| YLD_K7R | | | | | | IIF | | | | AFF | | | 3689 |
| TRIM16- | 0 | 0 | 0 | 0 | 22*01 | CAVKTSYDK | | | 11-3*01 | CASSVTSDQ | | | 3193 |
| RMA_R1T | | | | | | VIF | | | | TQYF | | | 3690 |
| ATP6AP1- | 0 | 0 | 0 | 0 | 12-2*01 | CAVTTTSGG | | | | | | | 3194 |
| KLG_G3W | | | | | | YQKVTF | | | | | | | |
| CDC37L1- | 0 | 0 | 0 | 0 | 8-1*01 | CAVNAGNTG | | | 13*01 | CASSFRGNT | | | 3195 |
| FLS_P6L | | | | | | KLIF | | | | GELFF | | | 3691 |
| PHKA2- | 0 | 0 | 0 | 0 | | | | | | | | | |
| LLS_SF | | | | | | | | | | | | | |
| KCNB2- | 0 | 0 | 0 | 0 | 12-2*01 | CAVSNDYKL | | | 3-1*01 | CASSPTGTG | | | 3196 |
| LLA_P6T | | | | | | SF | | | | GSDTQYF | | | 3692 |
| HAUS3- | 0 | 0 | 0 | 0 | 12-2*01 | CAVQGGGA | | | 13*01 | CASSFMTEA | | | 3197 |
| ILN_T7A | | | | | | DGLTF | | | | GELFF | | | 3693 |
| MRM1- | 0 | 0 | 0 | 0 | 8-1*01 | CAVIANNND | | | 19*01 | CASDSGSGQ | | | 3198 |
| 9_T6P | | | | | | MRF | | | | PQHF | | | 3694 |
| GLRA1- | KCNB2- | 0 | 0 | 0 | | | | | 6-5*01 | CASFNTGEL | | | 3695 |
| LIF_F6L | LLA_P6T | | | | | | | | | FF | | | |
| PRSS16- | 0 | 0 | 0 | 0 | | | | | 20-1*01 | CSARDPVGG | | | 3696 |
| LLL_L1Q | | | | | | | | | | SNTGELFF | | | |
| HAUS3- | 0 | 0 | 0 | 0 | 22*01F | QGGKLIF | 14/ | CAIPPSGT | | | | | 3199 |
| ILN_T7A | | | | | | | DV4*01 | YKYIF | | | | | 3467 |
| ZDHHC7- | 0 | 0 | 0 | 0 | 1-1*01 | CAAWNTGF | | | | | | | 3200 |
| SLL_P7L | | | | | | QKLVF | | | | | | | |
| ITIH6- | 0 | 0 | 0 | 0 | | | | | | | | | |
| RLG_G3V | | | | | | | | | | | | | |
| DCHS1- | PELP1- | 0 | 0 | 0 | 12-2*01 | CAVNVNDYK | | | 9*01 | CASSPTAEA | | | 3201 |
| TLF_I5M | LVL_L3F | | | | | LSF | | | | FF | | | 3697 |
| C17orf75- | 0 | 0 | 0 | 0 | | | | | | | | | |
| ALS_V7A | | | | | | | | | | | | | |
| 0 | 0 | 0 | 0 | 0 | 13-1*01 | CAASWEQG | | | 3-1*01 | CASSQDRGR | | | 3202 |
| | | | | | | SNYKLTF | | | | DQETQYF | | | 3698 |
| INTS1- | 0 | 0 | 0 | 0 | 39*01 | CAPSAGGGS | | | 2*01 | CASSPLGLA | | | 3203 |
| VLL_L3F | | | | | | EKLVF | | | | EQETQYF | | | 3699 |
| KCNB2- | MAR11- | 0 | 0 | 0 | 9-2 | CALSDPGFG | | | 7-9*01 | CASSLVRDR | | | 3204 |
| LLA_P6T | 9_F1L | | | | | NVLHC | | | | HTEAFF | | | 3700 |
| DHX33- | 0 | 0 | 0 | 0 | 29/ | YQLTF | 8-6*01 | CAVIDPAR | | | | | 3205 |
| LLA_K5T | | | | | DV5*01F | | | ARLMF | | | | | 3468 |
| C3orf58- | ST6GALNAC2- | 0 | 0 | 0 | | | | | 7-9*01 | CASGGDAYE | | | 3701 |
| LMV_L4P | LLF_Y6H | | | | | | | | | QYF | | | |
| GOLGA3- | 0 | 0 | 0 | 0 | 21*01 | CAVRSYNTD | | | 6-6*01 | CASTPGTSA | 7-3*01 | RASSFTAP | 3206 |
| SLD_P4L | | | | | | KLIF | | | | SRDTQYF | | GLQYNEQ | 3702 |
| | | | | | | | | | | | | FF | |
| ATP6AP1- | 0 | 0 | 0 | 0 | 8-3*01 | CAVDETTDS | | | 4-1*01 | CASSPGTAY | | | 3207 |
| KLG_G3W | | | | | | WGKLQF | | | | EQYF | | | 3703 |
| DRAM1- | 0 | 0 | 0 | 0 | | | | | | | | | |
| FII_I3F | | | | | | | | | | | | | |
| 0 | 0 | 0 | 0 | 0 | 8-3*01 | CAHLSGGYN | | | 13*01 | CASSLSADT | | | 3208 |
| | | | | | | KLIF | | | | QYF | | | 3704 |
| LCP1- | 0 | 0 | 0 | 0 | 17*01 | CATDANNAG | | | 2*01 | CASSDGNEQ | | | 3209 |
| NLF_PL | | | | | | NMLTF | | | | FF | | | 3705 |
| OR9Q2- | 0 | 0 | 0 | 0 | 19*01 | CALSEEADN | 36/ | CAVGRYD | 6-1*01 | CASDSNYGY | | | 3210 |
| SID_S1F | | | | | | NDMRF | DV7*01 | YKLSF | | TF | | | 3469 |
| | | | | | | | | | | | | | 3706 |
| ATP6AP1- | 0 | 0 | 0 | 0 | 38-2/ | CAYRRMVS | 22*01 | CAVGSQG | 4-1*01 | CASSPGTGY | | | 3211 |
| KLG_G3W | | | | | DV8*01 | GGSNYKLTF | | GSEKLVF | | EQYF | | | 3470 |
| | | | | | | | | | | | | | 3707 |
| 0 | 0 | 0 | 0 | 0 | 38-2/ | CAYREGAQK | | | | | | | 3212 |
| | | | | | DV8*01 | LVF | | | | | | | |
| ATP6AP1- | 0 | 0 | 0 | 0 | | | | | 9*01 | CASSVAGGY | | | 3708 |
| KLG_G3W | | | | | | | | | | EQYF | | | |
| A2ML1- | 0 | 0 | 0 | 0 | 8-3*01 | CAVGSPDYK | | | 7-9*01 | CASSWDRG | | | 3213 |
| YLD_K7R | | | | | | LSF | | | | TYEQYF | | | 3709 |
| GANAB- | 0 | 0 | 0 | 0 | 39*01 | CAVVQTSGS | | | 13*01 | CASSWRRG | | | 3214 |
| ALY_S5F | | | | | | RLTF | | | | TDTQYF | | | 3710 |
| VN1R2- | 0 | 0 | 0 | 0 | 17*01 | CATDAWGH | | | 5-4*01 | CASSLEFGA | | | 3215 |
| LML_L3F | | | | | | GGSQGNLIF | | | | DTQYF | | | 3711 |
| HAUS3- | 0 | 0 | 0 | 0 | | | | | | | | | |
| ILN_T7A | | | | | | | | | | | | | |
| PIGN- | 0 | 0 | 0 | 0 | 38-2/ | CAYRSDGD | | | 6-1*01 | CASSRTGSL | | | 3216 |
| FLT_P7H | | | | | DV8*01 | MRF | | | | NYGYTF | | | 3712 |
| TEAD1- | 0 | 0 | 0 | 0 | 3*01 | CAVRDGGSA | | | 11-2*01 | CASSSQELT | | | 3217 |
| VLE_L8F | | | | | | SKIIF | | | | EAFF | | | 3713 |
| 0 | 0 | 0 | 0 | 0 | 14/ | CAMRERGY | | | | | | | 3218 |
| | | | | | DV4*01 | STLTF | | | | | | | |
| CLCN4- | CLCN4- | 0 | 0 | 0 | 12-3*01 | CAMSLSNFG | | | 6-1*01 | CASSEKPDT | | | 3219 |
| LLA_G8V | LLA | | | | | NEKLTF | | | | QYF | | | 3714 |
| ATP6AP1- | 0 | 0 | 0 | 0 | 22*01 | CAVVKTSYD | | | 4-1*01 | CASSPGQGY | | | 3220 |
| KLG_G3W | | | | | | KVIF | | | | EQYF | | | 3715 |
| HAUS3- | 0 | 0 | 0 | 0 | | | | | | | | | |
| ILN_T7A | | | | | | | | | | | | | |
| PIGN- | 0 | 0 | 0 | 0 | 12-2*01 | CAVPRNSGN | | | 13*01 | CASSTLIGSG | | | 3221 |
| FLT_P7H | | | | | | TPLVF | | | | NTIYF | | | 3716 |
| ATP6AP1- | 0 | 0 | 0 | 0 | 12-2*01 | CAVNDGTAS | | | 4-1*01 | CASSQVVVG | | | 3222 |
| KLG_G3W | | | | | | KLTF | | | | YGYTF | | | 3717 |
| USP28- | 0 | 0 | 0 | 0 | | | | | | | | | |
| LII_C5F | | | | | | | | | | | | | |
| ITIH6- | 0 | 0 | 0 | 0 | | | | | | | | | |
| RLG_G3V | | | | | | | | | | | | | |
| PIGN- | 0 | 0 | 0 | 0 | | | | | 20-1*01 | CSARTGIGP | | | 3718 |
| FLT_P7H | | | | | | | | | | YEQYF | | | |
| RYR3- | 0 | 0 | 0 | 0 | | | | | | | | | |
| VLN_E6K | | | | | | | | | | | | | |
| ATP6AP1- | 0 | 0 | 0 | 0 | 12-2*01 | CAVTVDDMR | | | 9*01 | CASSPAPAY | | | 3223 |
| KLG_G3W | | | | | | F | | | | EQYF | | | 3719 |
| TEAD1- | 0 | 0 | 0 | 0 | 3*01 | CAVSLLSGG | | | | | | | 3224 |
| SVL_L9F | | | | | | YNKLIF | | | | | | | |
| SMOX- | 0 | 0 | 0 | 0 | 12-2*01 | CAESLDTDK | | | 20-1*01 | CSARGGGFE | | | 3225 |
| KLA_KN | | | | | | LIF | | | | TQYF | | | 3720 |
| HAUS3- | DHX33- | 0 | 0 | 0 | 12-2*01 | CAVDNARLM | | | 19*01 | CASSMSGW | | | 3226 |
| ILN_T7A | LLA_M4I | | | | | F | | | | GDTQYF | | | 3721 |
| 0 | 0 | 0 | 0 | 0 | 12-2*01 | CAVNGGGS | | | | | | | 3227 |
| | | | | | | QGNLIF | | | | | | | |
| C17orf75- | 0 | 0 | 0 | 0 | 19*01 | CALSEIVPTS | | | 5-4*01 | CASSSPSGY | | | 3228 |
| ALS_V7A | | | | | | GTYKYIF | | | | EQYF | | | 3722 |
| INTS1- | 0 | 0 | 0 | 0 | 4*01 | CLVGDSWN | | | 20-1*01 | CSARWDRV | | | 3229 |
| VLL_L3F | | | | | | YGQNFVF | | | | SSSTDTQYF | | | 3723 |
| OR14C36- | 0 | 0 | 0 | 0 | 14/ | CAMGSGYAL | | | | | | | 3230 |
| FML_V6L | | | | | DV4*01 | NF | | | | | | | |
| SLC16A7- | HTR1F- | 0 | 0 | 0 | 1-2*01 | CAVRDYGQK | | | 4-1*01 | CASSPTPGT | | | 3231 |
| AMA_P6L | 9_V1M | | | | | LLF | | | | GETQYF | | | 3724 |
| HAUS3- | 0 | 0 | 0 | 0 | 12-2*01 | CAVTPGTALI | | | 6-5*01 | CASSRDGPS | | | 3232 |
| ILN_T7A | | | | | | F | | | | SYEQYF | | | 3725 |
| INTS1- | 0 | 0 | 0 | 0 | 21*01 | CAVKGNDM | | | 10-2*01 | CASSEGWV | | | 3233 |
| VLL_L3F | | | | | | RF | | | | DTQYF | | | 3726 |
| ATP6AP1- | 0 | 0 | 0 | 0 | 8-3*01 | CAVFMEYGN | | | 4-1*01 | CASSQATGY | | | 3234 |
| KLG_G3W | | | | | | KLVF | | | | EQYF | | | 3727 |
| ATP6AP1- | 0 | 0 | 0 | 0 | | | | | 9*01 | CASSPSGGV | | | 3728 |
| KLG_G3W | | | | | | | | | | YGYTF | | | |
| OR5M3- | 0 | 0 | 0 | 0 | | | | | 3-1*01 | CASSPPDGQ | | | 3729 |
| KMV_T8N | | | | | | | | | | GDYGYTF | | | |
| OR14C36- | 0 | 0 | 0 | 0 | | | | | 27*01 | CASSSLGGY | | | 3730 |
| FML_V6L | | | | | | | | | | EQYF | | | |
| ATP6AP1- | 0 | 0 | 0 | 0 | 30*01 | CGTGGAGD | | | 9*01 | CASSVSTNY | | | 3235 |
| KLG_G3W | | | | | | YKLSF | | | | EQYF | | | 3731 |
| ATP6AP1- | 0 | 0 | 0 | 0 | 6*01 | CAPFNTDKLI | | | 20-1*01 | CSARDVGIS | | | 3236 |
| KLG_G3W | | | | | | F | | | | YEQYF | | | 3732 |
| KCNB2- | 0 | 0 | 0 | 0 | 3*01 | CAVRVGGD | | | 28*01 | CASTVRQGS | | | 3237 |
| LLA_P6T | | | | | | MRF | | | | NQPQHF | | | 3733 |
| TRIM58- | ATP6AP1- | 0 | 0 | 0 | 12-2*01 | CAVDLEVGG | | | 4-1*01 | CASSPDRFY | | | 3238 |
| YMV_V3F | KLG_G3W | | | | | NKLVF | | | | EQYF | | | 3734 |
| INTS1- | 0 | 0 | 0 | 0 | 14/ | CAMRELLFG | | | 7-3*01 | CASSSPGQG | | | 3239 |
| VLL_L3F | | | | | DV4*01 | NEKLTF | | | | YYEQYF | | | 3735 |
| ATP6AP1- | 0 | 0 | 0 | 0 | | | | | | | | | |
| KLG_G3W | | | | | | | | | | | | | |
| SHROOM2- | 0 | 0 | 0 | 0 | 38-2/ | CAYSPYNNN | | | 6-5*01 | CASSYVNGG | | | 3240 |
| KLL_D6V | | | | | DV8*01 | DMRF | | | | AIGGELFF | | | 3736 |
| INTS1- | 0 | 0 | 0 | 0 | 12-3*01 | CASYSGGGA | | | 13*01 | CASSLGAGS | | | 3241 |
| VLL_L3F | | | | | | DGLTF | | | | YEQYF | | | 3737 |
| ITIH6- | 0 | 0 | 0 | 0 | 14/ | CAMREGPG | 29/ | CAAKWGN | 29-1*01 | CSVEEWDTS | | | 3242 |
| RLG_G3V | | | | | DV4*01 | NTPLVF | DV5*01 | NDMRF | | GNTIYF | | | 3471 |
| | | | | | | | | | | | | | 3738 |
| SSPN- | 0 | 0 | 0 | 0 | | | | | | | | | |
| LMA_S8F | | | | | | | | | | | | | |
| ATP6AP1- | 0 | 0 | 0 | 0 | | | | | 4-1*01 | CASSQGEGY | | | 3739 |
| KLG_G3W | | | | | | | | | | EQYF | | | |
| OR14C36- | 0 | 0 | 0 | 0 | 21*01 | CAVRPDGYA | | | 13*01 | CASNLGGDN | | | 3243 |
| FML_V6L | | | | | | LNF | | | | EQFF | | | 3740 |
| MLL2- | 0 | 0 | 0 | 0 | 8-6*01 | CAVISTGGT | | | 11-2*01 | CASSFSGTF | | | 3244 |
| ALS_L8H | | | | | | SYGKLTF | | | | EAFF | | | 3741 |
| ATP6AP1- | 0 | 0 | 0 | 0 | 41*01 | CAVGEDGQ | | | 4-1*01 | CASSPGQGY | | | 3245 |
| KLG_G3W | | | | | | NFVF | | | | EQYF | | | 3715 |
| ATP6AP1- | SLC2A4- | 0 | 0 | 0 | 12-2*01 | CAVAGVISG | | | 19*01 | CASSISPSSY | | | 3246 |
| KLG_G3W | ILI_A4T | | | | | TYKYIF | | | | EQYF | | | 3742 |
| VN1R5- | 0 | 0 | 0 | 0 | | | | | | | | | |
| MII_S7Y | | | | | | | | | | | | | |
| CD47- | 0 | 0 | 0 | 0 | 5*01 | CAERDGGFK | | | 13*01 | CASSPRTGF | | | 3247 |
| GLT_V6F | | | | | | TIF | | | | SSGNTIYF | | | 3743 |
| 0 | 0 | 0 | 0 | 0 | | | | | | | | | |
| OR10A3- | 0 | 0 | 0 | 0 | | | | | | | | | |
| ILI_V6F | | | | | | | | | | | | | |
| MRM1- | 0 | 0 | 0 | 0 | 20*01 | CAVIWYNNN | | | 6-5*01 | CASSYSGAE | | | 3248 |
| 9_T6P | | | | | | DMRF | | | | QYF | | | 3744 |
| SMARCD3- | 0 | 0 | 0 | 0 | 8-3*01 | CAVYSGGGA | | | | | | | 3075 |
| KLF_H8Y | | | | | | DGLTF | | | | | | | |
| VN1R5- | 0 | 0 | 0 | 0 | 19*01 | CALSDPLGR | | | 6-1*01 | CASSEFTRS | | | 3249 |
| MII_S7Y | | | | | | DDKIIF | | | | YEQYF | | | 3745 |
| MRM1- | 0 | 0 | 0 | 0 | 12-3*01 | CAPPRRDDK | 20*01 | CAVQGYS | 19*01 | CASSIAPGN | | | 3250 |
| 9_T6P | | | | | | IIF | | NDYKLSF | | EQYF | | | 3472 |
| | | | | | | | | | | | | | 3746 |
| 0 | 0 | 0 | 0 | 0 | 12-2*01 | CAVNRDDKII | | | 3-1*01 | CASSQYSLS | | | 3251 |
| | | | | | | F | | | | TDTQYF | | | 3747 |
| OR5M3- | 0 | 0 | 0 | 0 | 14/ | CAMGDNYG | | | 9*01 | CASSVVGAR | | | 3252 |
| KMV_T8N | | | | | DV4*01 | QNFVF | | | | TDTQYF | | | 3748 |
| TEAD1- | 0 | 0 | 0 | 0 | 14/ | CAMKGAGS | | | 2*01 | CASSDPRGQ | | | 3253 |
| SVL_L9F | | | | | DV4*01 | YQLTF | | | | PNQPQHF | | | 3749 |
| PHKA2- | 0 | 0 | 0 | 0 | 12-2*01 | CASRPDKLIF | | | 27*01 | CASSPGGYY | | | 3254 |
| LLS_SF | | | | | | | | | | GYTF | | | 3750 |
| DRAM1- | GCN1L1-9 | 0 | 0 | 0 | | | | | | | | | |
| FII_I3F | | | | | | | | | | | | | |
| OR14C36- | 0 | 0 | 0 | 0 | | | | | 7-9*01 | CASNTGYQE | | | 3751 |
| FML_V6L | | | | | | | | | | TQYF | | | |
| HAUS3- | 0 | 0 | 0 | 0 | 22*01 | CAVTDNYGQ | | | 6-5*01 | CASSYNQGY | | | 3255 |
| ILN_T7A | | | | | | NFVF | | | | EQYF | | | 3752 |
| PHKA2- | 0 | 0 | 0 | 0 | | | | | | | | | |
| LLS_SF | | | | | | | | | | | | | |
| 0 | 0 | 0 | 0 | 0 | 14/ | CAMREGDV | | | 9*01 | CASSVTPAD | | | 3256 |
| | | | | | DV4*01 | SF | | | | TQYF | | | 3753 |
| DHX33- | 0 | 0 | 0 | 0 | 12-2*01 | CALNNARLM | | | | | | | 3257 |
| LLA_M4I | | | | | | F | | | | | | | |
| ATP6AP1- | 0 | 0 | 0 | 0 | 12-2*01 | CAVNRDSGY | | | 4-1*01 | CASSLEDSA | | | 3258 |
| KLG_G3W | | | | | | ALNF | | | | NYGYTF | | | 3754 |
| GANAB- | 0 | 0 | 0 | 0 | 12-2*01 | CAVTTDSWG | | | 6-5*01 | CASSYSGQG | | | 3259 |
| ALY_S5F | | | | | | KLQF | | | | YTF | | | 3755 |
| RYR3- | 0 | 0 | 0 | 0 | | | | | | | | | |
| VLN_E6K | | | | | | | | | | | | | |
| COL18A1- | 0 | 0 | 0 | 0 | 4*01 | CLVARSYNN | | | 28*01 | CASSSGYNE | | | 3260 |
| VLL_S8F | | | | | | NDMRF | | | | QFF | | | 3756 |
| SREBF1- | 0 | 0 | 0 | 0 | 12-2*01 | CAVRGSGTY | | | 19*01 | CASSISTEAF | | | 3261 |
| YLQ_L6M | | | | | | KYIF | | | | F | | | 3757 |
| CD47- | 0 | 0 | 0 | 0 | 17*01 | CGAGNMLTF | 12-2*01 | CAVNTFTG | 28*01 | CASTKTGLG | | | 3262 |
| GLT_V6F | | | | | | | | GGNKLTF | | DQPQHF | | | 3473 |
| | | | | | | | | | | | | | 3758 |
| ATP6AP1- | 0 | 0 | 0 | 0 | 24*01 | CAFAGTYKYI | 8-6*01 | CAVKAGN | 9*01 | CASSVGGGE | | | 3263 |
| KLG_G3W | | | | | | F | | FGNEKLTF | | VEAFF | | | 3474 |
| | | | | | | | | | | | | | 3759 |
| HAUS3- | 0 | 0 | 0 | 0 | 38-2/ | CAYRTSYDK | | | 20-1*01 | CSAGIPGQV | | | 3264 |
| ILN_T7A | | | | | DV8*01 | VIF | | | | FSSNEKLFF | | | 3760 |
| TPP2- | 0 | 0 | 0 | 0 | | | | | | | | | |
| SLA_WL | | | | | | | | | | | | | |
| TRIM58- | 0 | 0 | 0 | 0 | 8-6*01 | CAAMGDSSY | | | 7-6*01 | CASSPYSGA | | | 3265 |
| YMV_V3F | | | | | | KLIF | | | | NVLTF | | | 3761 |
| ERBB2- | 0 | 0 | 0 | 0 | | | | | | | | | |
| ALI_H8Y | | | | | | | | | | | | | |
| NSDHL- | 0 | 0 | 0 | 0 | | | | | 9*01 | CASSLAGAD | | | 3762 |
| ILT_A9V | | | | | | | | | | NEQFF | | | |
| C3orf58- | 0 | 0 | 0 | 0 | 14/ | CAMSTLDQI | | | 2*01 | CASIPVGSR | | | 3266 |
| LMV_L4P | | | | | DV4*01 | QGAQKLVF | | | | NTIYF | | | 3763 |
| PELP1- | 0 | 0 | 0 | 0 | | | | | | | | | |
| RLH_L7F | | | | | | | | | | | | | |
| APBB2- | 0 | 0 | 0 | 0 | 12-2*01 | CAAAPNDYK | | | 28*01 | CASSLGQGY | | | 3267 |
| VQY_L7F | | | | | | LSF | | | | NEQFF | | | 3764 |
| DHX33- | TRIM16- | 0 | 0 | 0 | 12-2*01 | CAVNPGSQ | | | 3-1*01 | CASSQWGG | | | 3268 |
| LLA_K5T | RMA_R1T | | | | | GNLIF | | | | NEQFF | | | 3765 |
| HAUS3- | 0 | 0 | 0 | 0 | 26-2*01 | CILRDSSGG | | | 28*01 | CASAPGLNY | | | 3269 |
| ILN_T7A | | | | | | GADGLTF | | | | EQYF | | | 3766 |
| INTS1- | 0 | 0 | 0 | 0 | 39*01 | CAVDMRADS | | | | | | | 3270 |
| VLL_L3F | | | | | | NYQLIW | | | | | | | |
| 0 | 0 | 0 | 0 | 0 | | | | | | | | | |
| TRPV3- | 0 | 0 | 0 | 0 | 35*01 | CAGRSTGAG | | | 5-4*01 | CASSSESGE | | | 3271 |
| LLL_A8V | | | | | | SYQLTF | | | | LFF | | | 3767 |
| SMARCD3- | 0 | 0 | 0 | 0 | | | | | | | | | |
| KLF_H8Y | | | | | | | | | | | | | |
| SHROOM2- | 0 | 0 | 0 | 0 | 9-2*01 | CALSDRGAQ | | | | | | | 3272 |
| KLL_D6V | | | | | | KLVF | | | | | | | |
| OR5M3- | 0 | 0 | 0 | 0 | 3*01 | CAVSPLDGY | | | 2*01 | CASSEHRDH | | | 3273 |
| KMV_T8N | | | | | | NKLIF | | | | EQFF | | | 3768 |
| 0 | 0 | 0 | 0 | 0 | | | | | | | | | |
| PHKA2- | 0 | 0 | 0 | 0 | 12-2 | PYSSASKIIF | | | 6-1*01 | CASSVPGQG | | | 3274 |
| LLS_SF | | | | | | | | | | VLEQYF | | | 3769 |
| 0 | 0 | 0 | 0 | 0 | | | | | | | | | |
| 0 | 0 | 0 | 0 | 0 | 26-1*01 | CIVRLSNTG | | | 20-1*01 | CSARDRGSS | | | 3275 |
| | | | | | | NQFYF | | | | NEKLFF | | | 3770 |
| IGF1- | 0 | 0 | 0 | 0 | 23/ | CAARDPYNQ | | | 11-2*01 | CASSPDPSG | | | 3276 |
| TMS_S4F | | | | | DV6*01 | GGKLIF | | | | NEQFF | | | 3771 |
| 0 | 0 | 0 | 0 | 0 | | | | | | | | | |
| APBB2- | 0 | 0 | 0 | 0 | | | | | | | | | |
| VQY_L7F | | | | | | | | | | | | | |
| GANAB- | 0 | 0 | 0 | 0 | 8-3*01 | CAVVLTDSW | | | | | | | 3277 |
| ALY_S5F | | | | | | GKLQF | | | | | | | |
| 0 | 0 | 0 | 0 | 0 | | | | | | | | | |
| 0 | 0 | 0 | 0 | 0 | | | | | | | | | |
| VN1R2- | 0 | 0 | 0 | 0 | | | | | | | | | |
| LML_L3F | | | | | | | | | | | | | |
| OR10A3- | 0 | 0 | 0 | 0 | | | | | | | | | |
| ILI_V6F | | | | | | | | | | | | | |
| MPV17- | ITIH6- | 0 | 0 | 0 | 21*01 | CAVRPYDKV | | | 6-6*01 | CASSYGLEQ | | | 3278 |
| YLW_A5P | RLG_G3V | | | | | IF | | | | YF | | | 3772 |
| 0 | 0 | 0 | 0 | 0 | | | | | | | | | |
| ST6GALNAC2- | ST6GALNAC2- | 0 | 0 | 0 | 27*01 | CAGLDQPG | 12-2*01 | CAVNSGY | 5-4*01 | CASSLGQGT | | | 3279 |
| LLF_Y6H | LLF | | | | | GSYIPTF | | ALNF | | YEQYF | | | 3475 |
| | | | | | | | | | | | | | 3773 |
| HAUS3- | 0 | 0 | 0 | 0 | | | | | 5-6*01 | CASSSAGLP | | | 3774 |
| ILN_T7A | | | | | | | | | | EQYF | | | |
| DHX33- | 0 | 0 | 0 | 0 | | | | | 11-2*01 | CASSLDFQG | | | 3775 |
| LLA_K5T | | | | | | | | | | PRDF | | | |
| CD47- | 0 | 0 | 0 | 0 | | | | | 9*01 | CASSTGQGG | | | 3776 |
| GLT_V6F | | | | | | | | | | DTQYF | | | |
| 0 | 0 | 0 | 0 | 0 | | | | | | | | | |
| 0 | 0 | 0 | 0 | 0 | | | | | | | | | |
| 0 | 0 | 0 | 0 | 0 | | | | | | | | | |
| 0 | 0 | 0 | 0 | 0 | | | | | | | | | |
| HTR1F-10 | 0 | 0 | 0 | 0 | 10*01 | CVVSGGYQK | | | 6-6*01 | CASRRQATN | | | 3280 |
| | | | | | | VTF | | | | EKLFF | | | 3777 |
| 0 | 0 | 0 | 0 | 0 | | | | | 5-1*01 | CASSMDAYT | | | 3778 |
| | | | | | | | | | | EAFF | | | |
| OR5M3- | 0 | 0 | 0 | 0 | | | | | | | | | |
| KMV | | | | | | | | | | | | | |
| OR5M3- | 0 | 0 | 0 | 0 | 26-2*01 | CILNVPGGY | | | 7-9*01 | CASSSSGGL | | | 3281 |
| KMV | | | | | | QKVTF | | | | DTQYF | | | 3779 |
| SEC24A- | 0 | 0 | 0 | 0 | 29/ | CAASPATSG | | | 3-1*01 | CASSPRLAG | | | 3282 |
| FLY | | | | | DV5*01 | TYKYIF | | | | GKYNEQFF | | | 3780 |
| OR5M3- | 0 | 0 | 0 | 0 | 8-3*01 | CAVDRVTGG | | | | | | | 3283 |
| KMV | | | | | | GNKLTF | | | | | | | |
| 0 | 0 | 0 | 0 | 0 | | | | | 2*01 | CASSEERPG | | | 3781 |
| | | | | | | | | | | EGYTF | | | |
| ITIH6- | 0 | 0 | 0 | 0 | 4*01 | CLVVSNSSA | 1-1*01 | CAVSPGN | 19*01 | CASSIPSRTT | | | 3284 |
| RLG | | | | | | SKIIF | | TPLVF | | NYGYTF | | | 3476 |
| | | | | | | | | | | | | | 3782 |
| HTR1F-10 | 0 | 0 | 0 | 0 | 26-1*01 | CIVRAALYNN | | | | | | | 3286 |
| | | | | | | DMRF | | | | | | | |
| HTR1F-9 | 0 | 0 | 0 | 0 | 5*01 | CAETVNTGF | | | 2*01 | CARTGAGGN | | | 3286 |
| | | | | | | QKLVF | | | | TIYF | | | 3783 |
| 0 | 0 | 0 | 0 | 0 | 13-1*01 | CAANEKLVF | | | 19*01 | CASSIAPAYG | | | 3287 |
| | | | | | | | | | | YTF | | | 3784 |
| GCN1L1- | 0 | 0 | 0 | 0 | 12-2*01 | CAVKGMRF | | | 20-1*01 | CSARNRDTY | | | 3288 |
| 10 | | | | | | | | | | YNEQFF | | | 3785 |
| ITIH6- | ITIH6- | 0 | 0 | 0 | | | | | 28*01 | CASSFRRDT | | | 3786 |
| RLG | RLG_G3V | | | | | | | | | DTQYF | | | |
| RYR3- | 0 | 0 | 0 | 0 | 12-2*01 | CAGTHMRF | | | 7-9*01 | CASSSWTG | | | 3289 |
| VLN | | | | | | | | | | GNEQYF | | | 3787 |
| OR5M3- | 0 | 0 | 0 | 0 | | | | | | | | | |
| KMV | | | | | | | | | | | | | |
| PHKA2- | 0 | 0 | 0 | 0 | 5*01 | CAILPDSGA | | | 27*01 | CASSVPGTP | | | 3290 |
| LLS | | | | | | GSYQLTF | | | | NTEAFF | | | 3788 |
| OR5M3- | 0 | 0 | 0 | 0 | 34*01 | CGADNSGG | | | 7-9*01 | CASSLSWLD | | | 3291 |
| KMV | | | | | | GADGLTF | | | | SQETQYF | | | 3789 |
| SSPN-9 | 0 | 0 | 0 | 0 | 17*01 | CATDALSGT | | | 9*01 | CASSVDGTE | | | 3292 |
| | | | | | | YKYIF | | | | ETQYF | | | 3790 |
| ITIH6- | 0 | 0 | 0 | 0 | | | | | | | | | |
| RLG | | | | | | | | | | | | | |
| 0 | 0 | 0 | 0 | 0 | 14/ | CAMRESYNN | 38-2/ | CAYRSFSN | | | | | 3293 |
| | | | | | DV4*01 | NDMRF | DV8*01 | AGNNRKLI | | | | | 3477 |
| | | | | | | | | W | | | | | |
| 0 | 0 | 0 | 0 | 0 | | | | | | | | | |
| TBX3- | 0 | 0 | 0 | 0 | | | | | | | | | |
| GMG | | | | | | | | | | | | | |
| 0 | 0 | 0 | 0 | 0 | | | | | 7-9*01 | CASSLGGGI | | | 3791 |
| | | | | | | | | | | EAFF | | | |
| SHROOM2- | 0 | 0 | 0 | 0 | | | | | | | | | |
| KLL | | | | | | | | | | | | | |
| 0 | 0 | 0 | 0 | 0 | | | | | | | | | |
| LCP1- | 0 | 0 | 0 | 0 | 14/ | CALNNAGNM | | | 9*01 | CASSEWDTE | | | 3294 |
| NLF | | | | | DV4*01 | LTF | | | | AFF | | | 3792 |
| HOXC9- | 0 | 0 | 0 | 0 | 12-2*01 | CAVINSGAG | | | | | | | 3295 |
| YMY | | | | | | SYQLTF | | | | | | | |
| ITIH6- | 0 | 0 | 0 | 0 | 38-2/ | CAYRTQKLV | | | 6-5*01 | CASSAGTIYN | | | 3296 |
| RLG | | | | | DV8*01 | F | | | | EQFF | | | 3793 |
| OR5M3- | 0 | 0 | 0 | 0 | 19*01 | CALILTQGGS | | | 13*01 | CASSQVRDR | | | 3297 |
| KMV | | | | | | EKLVF | | | | DINYGYTF | | | 3794 |
| HAUS3- | 0 | 0 | 0 | 0 | 14/ | CARITGGGN | | | 2*01 | CASSGPRGY | | | 3298 |
| ILN | | | | | DV4*01 | KLTF | | | | TF | | | 3795 |
| HTR1F-10 | 0 | 0 | 0 | 0 | | | | | | | | | |
| OR5M3- | 0 | 0 | 0 | 0 | | | | | | | | | |
| KMV | | | | | | | | | | | | | |
| VN1R2- | 0 | 0 | 0 | 0 | | | | | 3-1*01 | CASSQDWG | | | 3796 |
| LML | | | | | | | | | | AEAFF | | | |
| 0 | 0 | 0 | 0 | 0 | 8-1*01 | CAVNALYNF | | | | | | | 3299 |
| | | | | | | NKFYF | | | | | | | |
| 0 | 0 | 0 | 0 | 0 | | | | | | | | | |
| ZDHHC7- | 0 | 0 | 0 | 0 | | | | | | | | | |
| SLL | | | | | | | | | | | | | |
| 0 | 0 | 0 | 0 | 0 | | | | | 7-9*01 | CASSLVLYD | | | 3797 |
| | | | | | | | | | | GGLQETQYF | | | |
| OR10A3- | 0 | 0 | 0 | 0 | | | | | 6-1*01 | CASSAFGIVA | | | 3798 |
| ILI | | | | | | | | | | DTQYF | | | |
| IPO9- | 0 | 0 | 0 | 0 | | | | | | | | | |
| FSS | | | | | | | | | | | | | |
| GPR174- | 0 | 0 | 0 | 0 | | | | | | | | | |
| FSF | | | | | | | | | | | | | |
| GLRA1- | 0 | 0 | 0 | 0 | 38-1*01 | CAYGTGANN | | | 15*01 | CATSGGQSN | | | 3300 |
| LIF | | | | | | LFF | | | | EKLFF | | | 3799 |
| 0 | 0 | 0 | 0 | 0 | | | | | | | | | |
| 0 | 0 | 0 | 0 | 0 | | | | | | | | | |
| OR5M3- | 0 | 0 | 0 | 0 | 8-6*01 | CAVSADKLIF | | | | | | | 3301 |
| KMV | | | | | | | | | | | | | |
| HERC1- | 0 | 0 | 0 | 0 | 14/ | CAMRAITQG | | | 28*01 | CASSLSYTP | | | 3302 |
| SLL | | | | | DV4*01 | GSERLVF | | | | HQPQHF | | | 3800 |
| OR5M3- | 0 | 0 | 0 | 0 | | | | | | | | | |
| KMV | | | | | | | | | | | | | |
| ITIH6- | 0 | 0 | 0 | 0 | | | | | | | | | |
| RLG | | | | | | | | | | | | | |
| GLRA1- | 0 | 0 | 0 | 0 | | | | | | | | | |
| LIF | | | | | | | | | | | | | |
| GLRA1- | 0 | 0 | 0 | 0 | 17*01 | CATDQGNTP | | | 13*01 | CASSPGGTN | | | 3303 |
| LIF | | | | | | LVF | | | | EKLFF | | | 3801 |
| 0 | 0 | 0 | 0 | 0 | 38-2/ | CAYIGYDMR | | | 6-6*01 | CASSYLMGQ | | | 3304 |
| | | | | | DV8*01 | F | | | | GKGQAFF | | | 3802 |
| OR5M3- | 0 | 0 | 0 | 0 | | | | | | | | | |
| KMV | | | | | | | | | | | | | |
| 0 | 0 | 0 | 0 | 0 | 17*01 | CAIADSWGK | | | | | | | 3305 |
| | | | | | | LQF | | | | | | | |
| OR5M3- | 0 | 0 | 0 | 0 | 19*01 | CALSEQTSY | | | 7-9*01 | CASSAGGTE | | | 3306 |
| KMV | | | | | | DKVIF | | | | AFF | | | 3803 |
| LCP1- | 0 | 0 | 0 | 0 | | | | | | | | | |
| NLF | | | | | | | | | | | | | |
| 0 | 0 | 0 | 0 | 0 | 41*01 | CAPTRNAGG | | | 4-1*01 | CASSPYGDQ | | | 3307 |
| | | | | | | TSYGKLTF | | | | LNTGELFF | | | 3804 |
| HTR1F-10 | 0 | 0 | 0 | 0 | 10*01 | CVVKGGYNK | | | 6-6*01 | CASNREVST | | | 3308 |
| | | | | | | LIF | | | | DTQYF | | | 3805 |
| 0 | 0 | 0 | 0 | 0 | 12-2*01 | CAVVHGGQ | | | | | | | 3309 |
| | | | | | | NFVF | | | | | | | |
| KAT6A- | 0 | 0 | 0 | 0 | 38-2/ | CAMEGNEKL | | | 12-3*01, | CASRGTGTG | | | 3310 |
| KLS | | | | | DV8*01 | TF | | | 12-4*01 | SYEQYF | | | 3806 |
| GLRA1- | 0 | 0 | 0 | 0 | 24*01 | CAPHSNYQL | | | | | | | 3311 |
| LIF | | | | | | IW | | | | | | | |
| OR8D4-10 | 0 | 0 | 0 | 0 | 8-3*01 | CAVAPGSGG | | | 29-1*01 | CSVPGTAYE | | | 3312 |
| | | | | | | SNYKLTF | | | | QYF | | | 3807 |
| OR5M3- | 0 | 0 | 0 | 0 | 14/ | CAMREVYNN | | | 10-3*01 | CAISDLDSN | | | 3313 |
| KMV | | | | | DV4*01 | AGNMLTF | | | | QPQHF | | | 3808 |
| ITIH6- | 0 | 0 | 0 | 0 | 19*01 | CALSGYSTL | | | 19*01 | CASSISGGS | | | 3314 |
| RLG | | | | | | TF | | | | YEQYF | | | 3809 |
| OR5M3- | 0 | 0 | 0 | 0 | 41*01 | CAAENRDDK | | | | | | | 3315 |
| KMV | | | | | | IIF | | | | | | | |
| OR5M3- | 0 | 0 | 0 | 0 | 19*01 | CALKGNNRL | 17*01 | CATEGSYI | 7-9*01 | CASSLSWED | | | 3316 |
| KMV | | | | | | AF | | PTF | | ENTDTQYF | | | 3478 |
| | | | | | | | | | | | | | 3810 |
| CNKSR1- | CNKSR1- | 0 | 0 | 0 | 3*01 | CDPIPTRRLS | | | | | | | 3317 |
| SLA | SLA_A9V | | | | | F | | | | | | | |
| 0 | 0 | 0 | 0 | 0 | 12-3*01 | CAMSVGNA | | | | | | | 3318 |
| | | | | | | GNMLTF | | | | | | | |
| 0 | 0 | 0 | 0 | 0 | 10*01 | CLVSGGYNK | | | 20-1*01 | CSARVPTSF | | | 3319 |
| | | | | | | LIF | | | | TDTQYF | | | 3811 |
| ITIH6- | 0 | 0 | 0 | 0 | 14/ | CAMRGYQK | | | 19*01 | CASSASEPS | | | 3320 |
| RLG | | | | | DV4*01 | VTF | | | | GETQYF | | | 3812 |
| OR5M3- | 0 | 0 | 0 | 0 | 19*01 | CALSEASEY | | | 7-9*01 | CASSFPVSD | | | 3321 |
| KMV | | | | | | GNKLVF | | | | PSTDTQYF | | | 3813 |
| 0 | 0 | 0 | 0 | 0 | 17*01 | CATEVQGAQ | | | 13*01 | CASSFGETQ | | | 3322 |
| | | | | | | KLVF | | | | YF | | | 3814 |
| CHD8- | 0 | 0 | 0 | 0 | 17*01 | CATDAEGAQ | | | 4-2*01 | CASSPTSGG | | | 3323 |
| KLN | | | | | | KLVF | | | | YEQYF | | | 3815 |
| PLXNB1- | 0 | 0 | 0 | 0 | | | | | | | | | |
| VLF | | | | | | | | | | | | | |
| 0 | 0 | 0 | 0 | 0 | 24*01 | CAFRFNKFY | | | 27*01 | CASGPNQPQ | | | 3324 |
| | | | | | | F | | | | HF | | | 3816 |
| 0 | 0 | 0 | 0 | 0 | 5*01 | CAVLDGYNK | | | | | | | 3325 |
| | | | | | | LIF | | | | | | | |
| 0 | 0 | 0 | 0 | 0 | 38-2/ | CAYRSAWD | | | 19*01 | CASSPWTGS | | | 3326 |
| | | | | | DV8*01 | MRF | | | | YQETQYF | | | 3817 |
| 0 | 0 | 0 | 0 | 0 | 38-2/ | CALSGGGAD | 38-2/ | CAYRSPFL | | | | | 3327 |
| | | | | | DV8*01 | GLTF | DV8*01 | RAGTASKL | | | | | 3479 |
| | | | | | | | | TF | | | | | |
| 0 | 0 | 0 | 0 | 0 | 10*01 | CVVSGGYNK | | | 2*01 | CARTGEDNS | | | 3328 |
| | | | | | | LIF | | | | PLHF | | | 3818 |
| OR5M3- | 0 | 0 | 0 | 0 | 12-2*01 | CAVNLYARL | | | 19*01 | CASSTGISYE | | | 3329 |
| KMV | | | | | | MF | | | | QYF | | | 3819 |
| 0 | 0 | 0 | 0 | 0 | 8-2*01 | CVDGGYQK | | | 6-1*01 | CASSEEVSD | | | 3330 |
| | | | | | | VTF | | | | DSPLHF | | | 3820 |
| PHKA2- | 0 | 0 | 0 | 0 | 12-2*01 | CAVKNDYKL | | | 5-6*01 | CASGRSGED | | | 3331 |
| LLS | | | | | | SF | | | | YGYTF | | | 3821 |
| OR5M3- | 0 | 0 | 0 | 0 | | | | | | | | | |
| KMV | | | | | | | | | | | | | |
| OR5M3- | 0 | 0 | 0 | 0 | 5*01 | CAEAISGGY | | | | | | | 3332 |
| KMV | | | | | | NKLIF | | | | | | | |
| CCM2- | 0 | 0 | 0 | 0 | | | | | | | | | |
| YML_R6H | | | | | | | | | | | | | |
| 0 | 0 | 0 | 0 | 0 | | | | | | | | | |
| 0 | 0 | 0 | 0 | 0 | | | | | | | | | |
| ZDHHC7- | 0 | 0 | 0 | 0 | 8-1*01 | CAVNKPNQA | | | 14*01 | CASSQNPGQ | | | 3333 |
| SLL | | | | | | GTALIF | | | | GIYSPLHF | | | 3822 |
| 0 | 0 | 0 | 0 | 0 | 12-2*01 | CAVKNTGFQ | | | | | | | 3334 |
| | | | | | | KLVF | | | | | | | |
| MLL2- | 0 | 0 | 0 | 0 | 1-2*01 | CAVSHLIAG | | | 9*01 | CASSGQGAY | | | 3335 |
| ALS | | | | | | GFKTIF | | | | ITDTQYF | | | 3823 |
| TTLL12- | 0 | 0 | 0 | 0 | 12-2*01 | CAVNEDKIIF | | | 12-3*01, | CASSLASGN | | | 3336 |
| KLP | | | | | | | | | 12-4*01 | EQFF | | | 3824 |
| 0 | 0 | 0 | 0 | 0 | 12-1*01 | CVVNGNNN | | | 19*01 | CASSKGGNQ | | | 3337 |
| | | | | | | DMRF | | | | PQHF | | | 3825 |
| 0 | 0 | 0 | 0 | 0 | 21*01 | CAVEGSNFG | | | | | | | 3338 |
| | | | | | | NEKLTF | | | | | | | |
| LCP1- | 0 | 0 | 0 | 0 | 12-2*01 | CAVSNNDM | | | 7-2*01 | CASSLAKMD | | | 3339 |
| NLF | | | | | | RF | | | | LPLAKNIQYF | | | 3826 |
| ZNF827- | 0 | 0 | 0 | 0 | | | | | | | | | |
| NLF | | | | | | | | | | | | | |
| APCDD1L- | 0 | 0 | 0 | 0 | | | | | | | | | |
| RLP | | | | | | | | | | | | | |
| 0 | 0 | 0 | 0 | 0 | | | | | | | | | |
| HAUS3- | 0 | 0 | 0 | 0 | 20*01 | CAVLLSNDY | 19*01 | CALSEGER | | | | | 3340 |
| ILN | | | | | | KLSF | | DDKIIF | | | | | 3480 |
| 0 | 0 | 0 | 0 | 0 | | | | | 4-2*01 | CASSQGDRD | | | 3827 |
| | | | | | | | | | | SGNTIYF | | | |
| LCP1- | 0 | 0 | 0 | 0 | 12-3*01 | CAMEDTNAG | | | 11-2*01 | CASSLGGDE | | | 3341 |
| NLF | | | | | | KSTF | | | | QYF | | | 3828 |
| OR5M3- | 0 | 0 | 0 | 0 | 9-2*01 | CALSDGEFY | | | | | | | 3342 |
| KMV | | | | | | NQGGKLIF | | | | | | | |
| OR5M3- | 0 | 0 | 0 | 0 | | | | | 7-9*01 | CASSMPTGT | | | 3829 |
| KMV | | | | | | | | | | DSYEQYF | | | |
| OR9Q2- | 0 | 0 | 0 | 0 | 12-1*01 | CVVILNARLM | | | 20-1*01 | CSAIVFSRG | | | 3343 |
| FLF | | | | | | F | | | | GDEQFF | | | 3830 |
| OR1G1- | 0 | 0 | 0 | 0 | 30*01 | CGTDNAGGT | | | 19*01 | CASSPGQGY | | | 3344 |
| FLF | | | | | | SYGKLTF | | | | EQYF | | | 3715 |
| CHD8- | 0 | 0 | 0 | 0 | 13-1*01 | CAASMGQA | | | 4-2*01 | CASSPAGTD | | | 3345 |
| KLN | | | | | | GTALIF | | | | YGYTF | | | 3831 |
| FNDC3B- | 0 | 0 | 0 | 0 | | | | | | | | | |
| VVL | | | | | | | | | | | | | |
| OR5M3- | 0 | 0 | 0 | 0 | | | | | 7-9*01 | CASSSINRD | | | 3832 |
| KMV | | | | | | | | | | KMNTEAFF | | | |
| GANAB- | 0 | 0 | 0 | 0 | 12-2*01 | CAVSGGGA | | | 5-6*01 | CASSPGTSY | | | 3346 |
| ALY | | | | | | DGLTF | | | | EQYF | | | 3833 |
| OR5M3- | 0 | 0 | 0 | 0 | 14/ | CAMREGRD | | | | | | | 3347 |
| KMV | | | | | DV4*01 | FGNEKLTF | | | | | | | |
| OR5M3- | 0 | 0 | 0 | 0 | 17*01 | CATDAGDDK | | | 7-9*01 | CASSLAVGQ | | | 3348 |
| KMV | | | | | | IIF | | | | PGEEEQYF | | | 3834 |
| OR9Q2- | 0 | 0 | 0 | 0 | 19*01 | CALSEWGS | | | | | | | 3349 |
| FLF | | | | | | QGNLIF | | | | | | | |
| DCHS1- | 0 | 0 | 0 | 0 | 14/ | CAMREGGD | 13-1*01 | CAAIIGQK | | | | | 3350 |
| TLF | | | | | DV4*01 | SSYKLIF | | LLF | | | | | 3481 |
| 0 | 0 | 0 | 0 | 0 | | | | | 12-3*01, | CASSKGAGV | | | 3835 |
| | | | | | | | | | 12-4*01 | FQETQYF | | | |
| OR5M3- | 0 | 0 | 0 | 0 | 19*01 | CALSEADDY | | | 20-1*01 | CSAHPRDVQ | | | 3351 |
| KMV | | | | | | KLSF | | | | ETQYF | | | 3836 |
| OR10A3- | 0 | 0 | 0 | 0 | | | | | | | | | |
| ILI | | | | | | | | | | | | | |
| 0 | 0 | 0 | 0 | 0 | | | | | 7-9*01 | CASSSTREQ | | | 3837 |
| | | | | | | | | | | LIGEKLFF | | | |
| OR5M3- | 0 | 0 | 0 | 0 | 8-1*01F | CAVKSGAGF | | | 7-9*01 | CASSLNRGL | | | 3352 |
| KMV | | | | | | GNVLHC | | | | NTGELFF | | | 3838 |
| 0 | 0 | 0 | 0 | 0 | 12-2*01 | CAVNWNYG | | | | | | | 3353 |
| | | | | | | GSQGNLIF | | | | | | | |
| 0 | 0 | 0 | 0 | 0 | | | | | 7-9*01 | CASSFSSLD | | | 3839 |
| | | | | | | | | | | NYGYTF | | | |
| SMOX- | 0 | 0 | 0 | 0 | 21*01 | CAVEPGDDY | | | 12-5*01 | CASDPDSLIH | | | 3354 |
| KLA | | | | | | KLSF | | | | NTGELFF | | | 3840 |
| OR5M3- | 0 | 0 | 0 | 0 | | | | | 7-9*01 | CASSSTGTG | | | 3841 |
| KMV | | | | | | | | | | GSYNSPLHF | | | |
| OR8D4-9 | OR8D4- | 0 | 0 | 0 | 23/ | CAVNQAGTA | | | 9*01 | CASSDNDW | | | 3355 |
| | 9_G3E | | | | DV6*01 | LIF | | | | RLQYF | | | 3842 |
| OR5M3- | 0 | 0 | 0 | 0 | | | | | 7-9*01 | CASSSPTSG | | | 3843 |
| KMV | | | | | | | | | | ADNEQFF | | | |
| 0 | 0 | 0 | 0 | 0 | 12-1*01 | CVVNLNYGG | | | 6-5*01 | CASSYSNGY | | | 3356 |
| | | | | | | SQGNLIF | | | | EQYF | | | 3844 |
| 0 | 0 | 0 | 0 | 0 | 5*01 | CAEGLEDTG | | | 19*01 | CASSPGGYG | | | 3357 |
| | | | | | | KLIF | | | | YTF | | | 3845 |
| 0 | 0 | 0 | 0 | 0 | | | | | | | | | |
| OR5M3- | 0 | 0 | 0 | 0 | 14/ | CAMREAHD | | | 7-9*01 | CASSFWGLP | | | 3358 |
| KMV | | | | | DV4*01 | NFGNEKLTF | | | | HQETQYF | | | 3846 |
| KAT6A- | 0 | 0 | 0 | 0 | 3*01 | CAVRDEDDK | | | 7-9*01 | CASSLASEQ | | | 3359 |
| KLS | | | | | | IIF | | | | YF | | | 3847 |
| OR5M3- | CLCN4- | 0 | 0 | 0 | 8-4*01 | CAVSARAFG | | | 7-9*01 | CASSADRTQ | | | 3360 |
| KMV | LLA | | | | | NEKLTF | | | | NYGYTF | | | 3848 |
| RYR3- | 0 | 0 | 0 | 0 | | | | | | | | | |
| VLN | | | | | | | | | | | | | |
| SEC24A- | 0 | 0 | 0 | 0 | 22*01 | CAVEDNFNK | | | | | | | 3361 |
| FLY | | | | | | FYF | | | | | | | |
| 0 | 0 | 0 | 0 | 0 | | | | | | | | | |
| 0 | 0 | 0 | 0 | 0 | 19*01 | CALSEAYSG | | | | | | | 3362 |
| | | | | | | SARQLTF | | | | | | | |
| 0 | 0 | 0 | 0 | 0 | 12-2*01 | CAVKSEYGN | | | 20-1*01 | CSAYPAGDG | | | 3363 |
| | | | | | | KLVF | | | | TGELFF | | | 3849 |
| OR5M3- | 0 | 0 | 0 | 0 | 19*01 | CALSEGNFG | | | 7-9*01 | CASSPPLWG | | | 3364 |
| KMV | | | | | | NEKLTF | | | | VYGYTF | | | 3850 |
| DCHS1- | 0 | 0 | 0 | 0 | 14/ | CAMRGGMD | | | | | | | 3365 |
| TLF | | | | | DV4*01 | SSYKLIF | | | | | | | |
| LCP1-NLF | 0 | 0 | 0 | 0 | 21*01 | CAVDGQAGT | 26-2*01 | CILRGIPR | 15*01 | CATSRVVTGN | | | 3366 |
| | | | | | | ALIF | | DSSYKLIF | | EQFF | | | 3482 |
| | | | | | | | | | | | | | 3851 |
| TBX3- | TBX3- | 0 | 0 | 0 | 14/ | CAMTSFQKL | | | 13*01 | CASSLRGEK | | | 3367 |
| GMG | GMG_T8M | | | | DV4*01 | VF | | | | NNYGYTF | | | 3852 |
| ITIH6- | 0 | 0 | 0 | 0 | 3*01 | CAVRDTRSY | | | 19*01 | CASSIQGNS | | | 3368 |
| RLG | | | | | | NTDKLIF | | | | NQPQHF | | | 3853 |
| OR5M3- | 0 | 0 | 0 | 0 | 26-1*01 | CIVRIIKAAG | 14/ | CAMREGRV | 7-9*01 | CASSLVRAD | | | 3369 |
| KMV | | | | | | NKLTF | DV4*01 | FGNEKLTF | | GETQYF | | | 3483 |
| | | | | | | | | | | | | | 3854 |
| ITIH6-RLG | 0 | 0 | 0 | 0 | 14/ | CAMRESNNA | | | 6-6*01 | CASSATGTV | | | 3370 |
| | | | | | DV4*01 | RLMF | | | | NTEAFF | | | 3855 |
| SEC24A- | 0 | 0 | 0 | 0 | 22*01 | CAVEMTTDS | | | 19*01 | CASSIGGYG | | | 3371 |
| FLY | | | | | | WGKLQF | | | | YTF | | | 3856 |
| 0 | 0 | 0 | 0 | 0 | | | | | 19*01 | CASTGTSYE | | | 3857 |
| | | | | | | | | | | QYF | | | |
| SEC24A- | 0 | 0 | 0 | 0 | 14/ | CAMRELYTG | | | 28*01 | CASSPSGTG | | | 3372 |
| FLY | | | | | DV4*01 | GFKTIF | | | | FYEQYF | | | 3858 |
| DOLPP1- | 0 | 0 | 0 | 0 | 8-2*01 | CGMDSSYKL | | | 20-1*01 | CSARVQGAY | | | 3373 |
| GLM | | | | | | IF | | | | EQYF | | | 3859 |
| LCP1- | 0 | 0 | 0 | 0 | 21 | CAVWVGFG | 19*01 | CALSRGG | 4-2*01 | CASSQVLGF | | | 3374 |
| NLF | | | | | | NVLHC | | GADGLTF | | SYEQYF | | | 3484 |
| | | | | | | | | | | | | | 3860 |
| ITIH6- | 0 | 0 | 0 | 0 | 29/ | CAGGDSWG | | | 4-1*01 | CASSRKGDS | | | 3375 |
| RLG | | | | | DV5*01 | KLQF | | | | PLHF | | | 3861 |
| SLC16A7- | 0 | 0 | 0 | 0 | | | | | 6-1*01 | CASSHDDRG | | | 3862 |
| AMA | | | | | | | | | | PNEKLFF | | | |
| KAT6A- | 0 | 0 | 0 | 0 | 12-2*01 | CAVSGDAGN | | | 9*01 | CASSTGGDT | | | 3376 |
| KLS | | | | | | MLTF | | | | QYF | | | 3863 |
| OR5M3- | 0 | 0 | 0 | 0 | 5*01 | CAESMGND | | | 6-2*01, | CASSYGHPG | | | 3377 |
| KMV | | | | | | MRF | | | 6-3*01 | EQYF | | | 3864 |
| ZDHHC7- | 0 | 0 | 0 | 0 | 12-2*01 | CAVNNARLM | | | 20-1*01 | CSALTGLGN | | | 3378 |
| SLL | | | | | | F | | | | YGYTF | | | 3865 |
| 0 | 0 | 0 | 0 | 0 | 1-1*01 | CAGRGYSTL | | | 27*01 | CASSSDSSY | | | 3379 |
| | | | | | | TF | | | | EQYF | | | 3866 |
| 0 | 0 | 0 | 0 | 0 | | | | | 9*01 | CASTPGGSS | | | 3867 |
| | | | | | | | | | | YNSPLHF | | | |
| SEC24A- | 0 | 0 | 0 | 0 | 12-2*01 | CAVTARSSY | | | | | | | 3380 |
| FLY | | | | | | KLIF | | | | | | | |
| BCL9L- | 0 | 0 | 0 | 0 | 12-2*01 | CAVGDSNYQ | | | 6-5*01 | CASSFNYNE | | | 3381 |
| FVY | | | | | | LIW | | | | OFF | | | 3868 |
| 0 | 0 | 0 | 0 | 0 | | | | | | | | | |
| TBX3- | 0 | 0 | 0 | 0 | 38-2/ | CAYRSFNNN | | | 13*01 | CASRSRGGH | | | 3382 |
| GMG | | | | | DV8*01 | DMRF | | | | SPLHF | | | 3869 |
| OR5M3- | 0 | 0 | 0 | 0 | | | | | | | | | |
| KMV | | | | | | | | | | | | | |
| 0 | 0 | 0 | 0 | 0 | | | | | | | | | |
| TBX3- | 0 | 0 | 0 | 0 | 17*01 | CATDNDMRF | | | 13*01 | CASSFGPDE | | | 3383 |
| GMG | | | | | | | | | | QYF | | | 3870 |
| 0 | 0 | 0 | 0 | 0 | 12-2*01 | CAPSLDMRF | | | | | | | 3384 |
| 0 | 0 | 0 | 0 | 0 | 4*01 | CLVGDGGVT | | | 28*01 | CASSSTGDN | | | 3385 |
| | | | | | | GGGNKLTF | | | | SPLHF | | | 3871 |
| 0 | 0 | 0 | 0 | 0 | 5*01 | CAESMERG | | | 28*01 | CASQSWRG | | | 3386 |
| | | | | | | DKLIF | | | | MNTEAFF | | | 3872 |
| OR5M3- | 0 | 0 | 0 | 0 | 1-1*01 | CAVVDSNYQ | | | 11-1*01 | CASSSPWG | | | 3387 |
| KMV | | | | | | LIW | | | | GTTDTSTDT | | | 3873 |
| | | | | | | | | | | QYF | | | |
| ITIH6- | 0 | 0 | 0 | 0 | 12-2*01 | CAVYGDYG | | | 11-2*01 | CASSRGGLT | | | 3388 |
| RLG | | | | | | GSQGNLIF | | | | DTQYF | | | 3874 |
| OR5M3- | 0 | 0 | 0 | 0 | | | | | | | | | |
| KMV | | | | | | | | | | | | | |
| GOLGA3- | 0 | 0 | 0 | 0 | | | | | | | | | |
| SLD | | | | | | | | | | | | | |
| KAT6A- | 0 | 0 | 0 | 0 | 19*01 | CALSEAEEY | | | 12-3*01, | CASSFLSSY | | | 3389 |
| KLS | | | | | | GNKLVF | | | 12-4*01 | NEQFF | | | 3875 |
| OR6F1- | 0 | 0 | 0 | 0 | | | | | | | | | |
| VLN | | | | | | | | | | | | | |
| 0 | 0 | 0 | 0 | 0 | | | | | | | | | |
| 0 | 0 | 0 | 0 | 0 | 12-2*01 | CAVKNTGRR | | | | | | | 3390 |
| | | | | | | ALTF | | | | | | | |
| 0 | 0 | 0 | 0 | 0 | 20*01 | CAVQAFGNE | | | 18*01 | CASSGPEAY | | | 3391 |
| | | | | | | KLTF | | | | EQYF | | | 3876 |
| SHROOM2- | 0 | 0 | 0 | 0 | 17*01 | CATGGVSNT | 25*01 | CAGYDYKL | 10-3*01 | CAISESKGN | | | 3392 |
| KLL | | | | | | NAGKSTF | | SF | | YGYTF | | | 3485 |
| | | | | | | | | | | | | | 3877 |
| OR5M3- | 0 | 0 | 0 | 0 | 9-2*01 | CALILTNFGN | | | 7-9*01 | CASSAPGQG | | | 3393 |
| KMV | | | | | | EKLTF | | | | NEKLFF | | | 3878 |
| 0 | 0 | 0 | 0 | 0 | | | | | | | | | |
| RYR3- | 0 | 0 | 0 | 0 | | | | | 19*01 | CASSIVDRPY | | | 3879 |
| VLN | | | | | | | | | | EQYF | | | |
| ITIH6- | 0 | 0 | 0 | 0 | 29/ | CAASVGDML | | | 15*01 | CATSRGTGA | | | 3394 |
| RLG | | | | | DV5*01 | TF | | | | GEQYF | | | 3880 |
| ITIH6- | 0 | 0 | 0 | 0 | 38-2/ | CAYTSNDMR | | | 7-4*01 | RASSPRTGG | 10-2*01 | CASSEFR | 3147 |
| RLG | | | | | DV8*01 | F | | | | EQYF | | NVGGYTF | 3881 |
| 0 | 0 | 0 | 0 | 0 | 3*01 | CAVRDNNFN | | | 6-6*01 | CASSYLDGA | | | 3395 |
| | | | | | | KFYF | | | | YEQYF | | | 3882 |
| MYPN- | MYPN- | 0 | 0 | 0 | 38-2/ | CAYMDSNY | | | 25-1*01 | CASSTGADL | | | 3396 |
| RVI_R1L | RVI | | | | DV8*01 | QLIW | | | | TYEQYF | | | 3883 |
| 0 | 0 | 0 | 0 | 0 | 38-2/ | CAYNQGGKL | | | 12-3*01, | CASSFTRDL | | | 3397 |
| | | | | | DV8*01 | IF | | | 12-4*01 | YGYTF | | | 3884 |
| OR5M3- | 0 | 0 | 0 | 0 | | | | | 7-9*01 | CASSLAVGE | 7-9*01 | CASLKMG | 3885 |
| KMV | | | | | | | | | | TRNSPLHF | | GLDEQFF | |
| 0 | 0 | 0 | 0 | 0 | | | | | 7-9*01 | CASSGTGGY | | | 3886 |
| | | | | | | | | | | EQYF | | | |
| OR5M3- | 0 | 0 | 0 | 0 | 4*01 | CLVGYSGGY | | | 7-9*01 | CASSLAGDR | | | 3398 |
| KMV | | | | | | QKVTF | | | | GRNSPLHF | | | 3887 |
| PIGN- | 0 | 0 | 0 | 0 | 12-2*01 | CAVVYSGGG | | | 19*01 | CASSPWTGA | | | 3399 |
| FLT | | | | | | ADGLTF | | | | EKLFF | | | 3888 |
| OR5M3- | 0 | 0 | 0 | 0 | | | | | 7-9*01 | CASSYFFEG | | | 3889 |
| KMV | | | | | | | | | | LNTGELFF | | | |
| LCP1- | 0 | 0 | 0 | 0 | | | | | 13*01 | CASSSPSGG | | | 3890 |
| NLF | | | | | | | | | | RTDTQYF | | | |
| OR5M3- | 0 | 0 | 0 | 0 | | | | | 7-9*01 | CASSFFASG | | | 3891 |
| KMV | | | | | | | | | | DTDTQYF | | | |
| VN1R2- | 0 | 0 | 0 | 0 | | | | | | | | | |
| LML | | | | | | | | | | | | | |
| 0 | 0 | 0 | 0 | 0 | 9-2*01 | CALTKETSG | | | 5-1*01 | CASSLEGTS | | | 3400 |
| | | | | | | SRLTF | | | | LNEQFF | | | 3892 |
| 0 | 0 | 0 | 0 | 0 | | | | | 2*01 | CASSPDSDH | | | 3893 |
| | | | | | | | | | | YGYTF | | | |
| 0 | 0 | 0 | 0 | 0 | | | | | 6-5*01 | CASSQFMNT | | | 3894 |
| | | | | | | | | | | EAFF | | | |
| 0 | 0 | 0 | 0 | 0 | 21*01 | CAVLNDYKL | 27*01 | CAGGTGY | 12-3*01, | CASSLQGNG | | | 3401 |
| | | | | | | SF | | NKLIF | 12-4*01 | YTF | | | 3486 |
| | | | | | | | | | | | | | 3895 |
| 0 | 0 | 0 | 0 | 0 | | | | | 5-5*01 | CASSLGGLS | | | 3896 |
| | | | | | | | | | | GYTF | | | |
| 0 | 0 | 0 | 0 | 0 | | | | | 27*01 | CASSFQGGT | | | 3897 |
| | | | | | | | | | | GYTF | | | |
| 0 | 0 | 0 | 0 | 0 | 4*01 | CLVGDPVDK | | | 6-1*01 | CASSEDGYE | | | 3402 |
| | | | | | | IIF | | | | QYF | | | 3898 |
| 0 | 0 | 0 | 0 | 0 | | | | | 6-2*01, | CASKNDGNS | | | 3899 |
| | | | | | | | | | 6-3*01 | PLHF | | | |
| SEC24A- | 0 | 0 | 0 | 0 | | | | | | | | | |
| FLY | | | | | | | | | | | | | |
| 0 | 0 | 0 | 0 | 0 | 17*01 | CATDEGGST | | | 13*01 | CASSLVTSG | | | 3403 |
| | | | | | | LGRLYF | | | | EQFF | | | 3900 |
| OR5M3- | 0 | 0 | 0 | 0 | | | | | | | | | |
| KMV | | | | | | | | | | | | | |
| OR5M3- | OR5M3- | 0 | 0 | 0 | 8-2*01 | CVVTISGGY | | | 11-2*01 | CASSLPDNN | | | 3404 |
| KMV | KMV_T8N | | | | | NKLIF | | | | EQFF | | | 3901 |
| 0 | 0 | 0 | 0 | 0 | 12-2*01 | CASGGGNM | | | 20-1*01 | CSATDVWGY | | | 3405 |
| | | | | | | LTF | | | | TF | | | 3902 |
| MRM1-9 | 0 | 0 | 0 | 0 | 12-2*01 | CAGNNARLM | | | 7-9*01 | CASSNLGGT | | | 3406 |
| | | | | | | F | | | | DTQYF | | | 3903 |
| KCNB2- | 0 | 0 | 0 | 0 | 19*01 | CALIYFSGGY | | | 7-6*01 | CASSSPSQG | | | 3407 |
| LLA | | | | | | NKLIF | | | | ITGELFF | | | 3904 |
| OR5M3- | 0 | 0 | 0 | 0 | 1-1*01 | CICEGGSYIP | | | 7-9*01 | CASSFWRD | | | 3408 |
| KMV | | | | | | TF | | | | GATNEKLFF | | | 3905 |
| HTR1F- | 0 | 0 | 0 | 0 | | | | | | | | | |
| 10 | | | | | | | | | | | | | |
| 0 | 0 | 0 | 0 | 0 | | | | | | | | | |
| HAUS3- | 0 | 0 | 0 | 0 | 21*01 | CAVITGGGN | | | | | | | 3409 |
| ILN | | | | | | KLTF | | | | | | | |
| SCN3A- | 0 | 0 | 0 | 0 | | | | | 27*01 | CASSFSARE | | | 3906 |
| ALV | | | | | | | | | | YGYTF | | | |
| 0 | 0 | 0 | 0 | 0 | 12-3*01 | CAMSGHDM | | | 27*01 | CASSFGANY | | | 3410 |
| | | | | | | RF | | | | GYTF | | | 3907 |
| LCP1- | 0 | 0 | 0 | 0 | 8-3*01 | CAVVRGDTD | | | 11-2*01 | CASSLYVYS | | | 3411 |
| NLF | | | | | | KLIF | | | | YEQYF | | | 3908 |
| LCP1- | 0 | 0 | 0 | 0 | 5*01 | CAEETGGGN | | | 11-2*01 | CASSLMGAE | | | 3412 |
| NLF | | | | | | KLTF | | | | AFF | | | 3909 |
| ATP6AP1- | KAT6A- | 0 | 0 | 0 | | | | | 4-1*01 | CASSQAGDG | | | 3910 |
| KLG | KLS | | | | | | | | | SYEQYF | | | |
| 0 | 0 | 0 | 0 | 0 | | | | | 3-1*01 | CASSQLDYN | | | 3911 |
| | | | | | | | | | | EQFF | | | |
| NOS1- | 0 | 0 | 0 | 0 | 38-1*01 | CAFIRGSQG | | | 11-2*01 | CASSFWSG | | | 3413 |
| FID | | | | | | NLIF | | | | GTYEQYF | | | 3912 |
| 0 | 0 | 0 | 0 | 0 | 26-2*01 | CILSYNTGN | 14/ | CAIIRFGN | 19*01 | CASSATSGA | | | 3414 |
| | | | | | | QFYF | DV4*01 | EKLTF | | YNEQFF | | | 3487 |
| | | | | | | | | | | | | | 3913 |
| 0 | 0 | 0 | 0 | 0 | | | | | 20-1*01 | CSARAVTNT | | | 3914 |
| | | | | | | | | | | GELFF | | | |
| 0 | 0 | 0 | 0 | 0 | | | | | | | | | |
| OR9Q2- | 0 | 0 | 0 | 0 | 12-2*01 | CAPRGSGR | | | 28*01 | CASSLQGGG | | | 3415 |
| FLF | | | | | | RALTF | | | | GYTF | | | 3915 |
| CD47- | APBB2- | 0 | 0 | 0 | | | | | | | | | |
| GLT | VQY_L7F | | | | | | | | | | | | |
| 0 | 0 | 0 | 0 | 0 | 35*01 | CAGPHLSYN | | | 14*01 | CASSQVGQ | | | 3416 |
| | | | | | | TDKLIF | | | | GQF | | | 3916 |
| ITIH6- | 0 | 0 | 0 | 0 | 8-3*01 | CAVGAGNN | | | 9*01 | CASSVYSTD | 4-3*01 | CASRVSA | 3417 |
| RLG | | | | | | DMRF | | | | TQYF | | SSYNEQF | 3917 |
| | | | | | | | | | | | | F | |
| 0 | 0 | 0 | 0 | 0 | | | | | 7-9*01 | CASSYLGRV | | | 3918 |
| | | | | | | | | | | NKNIQYF | | | |
| OR5M3- | 0 | 0 | 0 | 0 | 21*01 | CAVPSRPNF | 40*01 | CLLLNYGG | 7-9*01 | CASSLGGTE | | | 3418 |
| KMV | | | | | | GNEKLTF | | SQGNLIF | | AFF | | | 3488 |
| | | | | | | | | | | | | | 3919 |
| GABRG3- | 0 | 0 | 0 | 0 | | | | | 20-1*01 | CSARNRASY | | | 3920 |
| TAM | | | | | | | | | | NSPLHF | | | |
| 0 | 0 | 0 | 0 | 0 | 19*01 | CALPDIQGA | | | 18*01 | CASSQQGFY | | | 3419 |
| | | | | | | QKLVF | | | | EQYF | | | 3921 |
| 0 | 0 | 0 | 0 | 0 | 14/ | CAMREDYG | | | 15*01 | CATTPDRGH | | | 3420 |
| | | | | | DV4*01 | GSQGNLIF | | | | QPQHF | | | 3922 |
| OR5M3- | 0 | 0 | 0 | 0 | | | | | | | | | |
| KMV | | | | | | | | | | | | | |
| 0 | 0 | 0 | 0 | 0 | | | | | 6-5*01 | CASSYLEGD | | | 3923 |
| | | | | | | | | | | NYGYTF | | | |
| OR5M3- | 0 | 0 | 0 | 0 | | | | | | | | | |
| KMV | | | | | | | | | | | | | |
| OR5M3- | 0 | 0 | 0 | 0 | | | | | | | | | |
| KMV | | | | | | | | | | | | | |
| OR5M3- | 0 | 0 | 0 | 0 | 26-1*01 | CIVRVGYNA | | | 7-9*01 | CASSLGHFE | | | 3421 |
| KMV | | | | | | RLMF | | | | GNQPQHF | | | 3924 |
| 0 | 0 | 0 | 0 | 0 | | | | | | | | | |
| 0 | 0 | 0 | 0 | 0 | | | | | 29-1*01 | CSVTGNNYG | | | 3925 |
| | | | | | | | | | | YTF | | | |
| 0 | 0 | 0 | 0 | 0 | | | | | | | | | |
| ZDHHC7- | 0 | 0 | 0 | 0 | | | | | 7-9*01 | CASSSETNW | | | 3926 |
| SLL | | | | | | | | | | GTGGNQPQ | | | |
| | | | | | | | | | | HF | | | |
| NOS1- | 0 | 0 | 0 | 0 | 34*01 | CGAVFLNDY | | | 27*01 | CASSMTVMN | | | 3422 |
| FID | | | | | | KLSF | | | | TEAFF | | | 3927 |
| DHX33- | OR1G1- | 0 | 0 | 0 | 22*01 | CAVDIATFG | | | 9*01 | CASSVDFGR | | | 3423 |
| LLA_K5T | FLF | | | | | NEKLTF | | | | TYNEQFF | | | 3928 |
| OR5M3- | 0 | 0 | 0 | 0 | | | | | | | | | |
| KMV | | | | | | | | | | | | | |
| OR5M3- | DHX33- | 0 | 0 | 0 | 25*01F | STSFGSNYG | 8-6*01 | CAVSVGVK | 7-9*01 | CASSLVPSG | | | 3424 |
| KMV | LLA_K5T | | | | | QNFVF | | YNFNKFYF | | QANTEAFF | | | 3489 |
| | | | | | | | | | | | | | 3929 |
| 0 | 0 | 0 | 0 | 0 | 10*01 | CVVLGGYNK | | | | | | | 3425 |
| | | | | | | LIF | | | | | | | |
| 0 | 0 | 0 | 0 | 0 | | | | | | | | | |
| HCV- | 0 | 0 | 0 | 0 | | | | | 6-2*01, | CASSYRGVE | | | 3930 |
| KLV(APC) | | | | | | | | | 6-3*01 | QYF | | | |
| 0 | 0 | 0 | 0 | 0 | 19*01 | CALSEAGDY | | | 3-1*01 | CASSTEGRS | | | 3426 |
| | | | | | | KLSF | | | | SYEQYF | | | 3931 |
| 0 | 0 | 0 | 0 | 0 | 22*01 | CAVYDNFNK | | | | | | | 3427 |
| | | | | | | FYF | | | | | | | |
| 0 | 0 | 0 | 0 | 0 | | | | | | | | | |
| NSDHL- | NSDHL- | 0 | 0 | 0 | 19*01 | CALMMTTDS | | | | | | | 3428 |
| ILT_A9V | ILT | | | | | WGKLQF | | | | | | | |
| 0 | 0 | 0 | 0 | 0 | | | | | | | | | |
| OR5M3- | 0 | 0 | 0 | 0 | 38-2/ | CACTGGGA | | | 27*01 | CASSLSPTD | | | 3429 |
| KMV | | | | | DV8*01 | DGLTF | | | | TQYF | | | 3932 |
| KCNB2- | 0 | 0 | 0 | 0 | 19*01 | CALNTIRDSN | | | 20-1*01 | CSARVRGDH | | | 3430 |
| LLA | | | | | | YQLIW | | | | NEQFF | | | 3933 |
| 0 | 0 | 0 | 0 | 0 | | | | | 7-9*01 | CASSSYTDK | | | 3934 |
| | | | | | | | | | | KSPGELFF | | | |
| 0 | 0 | 0 | 0 | 0 | | | | | 7-9*01 | CASSPTDTQ | | | 3935 |
| | | | | | | | | | | YF | | | |
| OR5M3- | 0 | 0 | 0 | 0 | | | | | 7-9*01 | CASSLERGM | | | 3936 |
| KMV | | | | | | | | | | GSNQPQHF | | | |
| 0 | 0 | 0 | 0 | 0 | | | | | 7-9*01 | CASSDWTGS | | | 3937 |
| | | | | | | | | | | NEQFF | | | |
| 0 | 0 | 0 | 0 | 0 | | | | | | | | | |
| 0 | 0 | 0 | 0 | 0 | | | | | 6-5*01 | CASSNTGGR | | | 3938 |
| | | | | | | | | | | ETQYF | | | |
| 0 | 0 | 0 | 0 | 0 | | | | | | | | | |
| 0 | 0 | 0 | 0 | 0 | 8-4*01 | CAVSEYDKII | | | 12-3*01, | CASSSSGGG | | | 3431 |
| | | | | | | F | | | 12-4*01 | TEQFF | | | 3939 |
| 0 | 0 | 0 | 0 | 0 | | | | | 10-3*01 | CATWTGGG | | | 3940 |
| | | | | | | | | | | SEAFF | | | |
| 0 | 0 | 0 | 0 | 0 | 5*01 | CAEIISSASKI | | | | | | | 3432 |
| | | | | | | IF | | | | | | | |
| PELP1- | PELP1- | 0 | 0 | 0 | 19*01 | CARLTGANN | | | | | | | 3433 |
| LVL | LVL_L3F | | | | | LFF | | | | | | | |
| ITIH6- | 0 | 0 | 0 | 0 | | | | | | | | | |
| RLG | | | | | | | | | | | | | |
| 0 | 0 | 0 | 0 | 0 | | | | | | | | | |
| 0 | 0 | 0 | 0 | 0 | | | | | | | | | |
| OR5M3- | 0 | 0 | 0 | 0 | | | | | | | | | |
| KMV | | | | | | | | | | | | | |
| HTR1F- | 0 | 0 | 0 | 0 | | | | | | | | | |
| 10 | | | | | | | | | | | | | |
| 0 | 0 | 0 | 0 | 0 | 12-2*01 | CAVSPFSDG | | | | | | | 3434 |
| | | | | | | QKLLF | | | | | | | |
| OR5M3- | 0 | 0 | 0 | 0 | | | | | | | | | |
| KMV | | | | | | | | | | | | | |
| 0 | 0 | 0 | 0 | 0 | | | | | | | | | |
| OR5M3- | OR5M3- | 0 | 0 | 0 | 26-2*01 | CILRDMEYG | | | 7-9*01 | CASSRYGGP | | | 3435 |
| KMV | KMV_T8N | | | | | NKLVF | | | | SDNEQFF | | | 3941 |
| ITIH6- | 0 | 0 | 0 | 0 | 38-2/ | CAFNDYKLS | | | 10-3*01 | CAIRDRLNTE | | | 3436 |
| RLG | | | | | DV8*01 | F | | | | AFF | | | 3942 |
| 0 | 0 | 0 | 0 | 0 | | | | | | | | | |
| HTR1F- | 0 | 0 | 0 | 0 | 10*01 | CVVSGGYNK | | | 4-2*01 | CASSQGTSR | | | 3328 |
| 10 | | | | | | LIF | | | | DRNQPQHF | | | 3943 |
| 0 | 0 | 0 | 0 | 0 | 13-1*01 | CAASRLPGY | | | 7-9*01 | CASTLGGEG | | | 3437 |
| | | | | | | SSASKIIF | | | | RNTGELFF | | | 3944 |
| ST6GALNAC2- | 0 | 0 | 0 | 0 | 12-3*01 | CAMKDNDM | | | 5-4*01 | CARGSGGET | | | 3438 |
| LLF | | | | | | RF | | | | QYF | | | 3945 |
| 0 | 0 | 0 | 0 | 0 | | | | | | | | | |
| ERBB2- | 0 | 0 | 0 | 0 | 12-2*01 | CAVNSNSGY | | | 4-1*01 | CASSQSETG | | | 3439 |
| ALI | | | | | | ALNF | | | | DGYTF | | | 3946 |
| 0 | 0 | 0 | 0 | 0 | | | | | | | | | |
| 0 | 0 | 0 | 0 | 0 | | | | | | | | | |
| 0 | 0 | 0 | 0 | 0 | | | | | | | | | |
| KCNB2- | 0 | 0 | 0 | 0 | | | | | 19*01 | CASSITFSDT | | | 3947 |
| LLA | | | | | | | | | | QYF | | | |
| ZNF827- | 0 | 0 | 0 | 0 | 17*01 | CASSGGSYI | | | | | | | 3440 |
| NLF | | | | | | PTF | | | | | | | |
| 0 | 0 | 0 | 0 | 0 | 12-2*01 | CAVNDYKLS | | | 4-1*01 | CASSQALDQ | | | 3441 |
| | | | | | | F | | | | PQHF | | | 3948 |
| SCN3A- | 0 | 0 | 0 | 0 | 14/ | CAMREHGTA | | | | | | | 3442 |
| ALV | | | | | DV4*01 | GNKLTF | | | | | | | |
| 0 | 0 | 0 | 0 | 0 | | | | | | | | | |
| 0 | 0 | 0 | 0 | 0 | | | | | 19*01 | CASSNRDRG | | | 3949 |
| | | | | | | | | | | PYEQYF | | | |
| 0 | 0 | 0 | 0 | 0 | | | | | | | | | |
| ME1- | 0 | 0 | 0 | 0 | 14/ | CAMRERTG | | | 20-1*01 | CSARQTSGG | | | 3443 |
| FLD | | | | | DV4*01 | GFKTIF | | | | SSYNEQFF | | | 3950 |
| ITIH6- | 0 | 0 | 0 | 0 | | | | | | | | | |
| RLG | | | | | | | | | | | | | |
| 0 | 0 | 0 | 0 | 0 | | | | | | | | | |
| 0 | 0 | 0 | 0 | 0 | 12-2*01 | CAVMTTDS | | | 7-9*01 | CASSSLGLF | | | 3444 |
| | | | | | | WGKLQF | | | | AEQFF | | | 3951 |
| NSDHL- | NSDHL- | 0 | 0 | 0 | 14/ | CAMRETPQ | | | 2*01 | CASSEGQNT | | | 3445 |
| ILT | ILT_A9V | | | | DV4*01 | GGSEKLVF | | | | EAFF | | | 3952 |
| 0 | 0 | 0 | 0 | 0 | 24*01 | CAFINDYKLS | | | 6-2*01, | CASSTGPYN | | | 3446 |
| | | | | | | F | | | 6-3*01 | EQFF | | | 3953 |
| GPR174- | 0 | 0 | 0 | 0 | 20*01 | CAVSDTGGF | | | 7-8*01 | CASSLTGSS | | | 3447 |
| FSF | | | | | | KTIF | | | | DTQYF | | | 3954 |
| 0 | 0 | 0 | 0 | 0 | | | | | | | | | |
| OR5M3- | 0 | 0 | 0 | 0 | | | | | | | | | |
| KMV | | | | | | | | | | | | | |
| 0 | 0 | 0 | 0 | 0 | 12-1*01 | CVVNMEGG | | | 14*01 | CASSQAGQ | | | 3448 |
| | | | | | | GADGLTF | | | | GFRTEAFF | | | 3955 |
| 0 | 0 | 0 | 0 | 0 | | | | | | | | | |
| 0 | 0 | 0 | 0 | 0 | | | | | | | | | |
| HTR1F- | 0 | 0 | 0 | 0 | | | | | | | | | |
| 10 | | | | | | | | | | | | | |
| 0 | 0 | 0 | 0 | 0 | | | | | | | | | |
| OR5M3- | 0 | 0 | 0 | 0 | | | | | 7-9*01 | CASSLGQER | | | 3956 |
| KMV | | | | | | | | | | PYEQYF | | | |
| 0 | 0 | 0 | 0 | 0 | | | | | | | | | |
| 0 | 0 | 0 | 0 | 0 | | | | | | | | | |
| 0 | 0 | 0 | 0 | 0 | | | | | | | | | |
| 0 | 0 | 0 | 0 | 0 | | | | | | | | | |
| HTR1F- | 0 | 0 | 0 | 0 | | | | | | | | | |
| 10 | | | | | | | | | | | | | |
| GLRA1- | 0 | 0 | 0 | 0 | | | | | 5-1*01 | CASSFGQGY | | | 3957 |
| LIF | | | | | | | | | | EQYF | | | |
| 0 | 0 | 0 | 0 | 0 | | | | | | | | | |
| 0 | 0 | 0 | 0 | 0 | | | | | | | | | |
| 0 | 0 | 0 | 0 | 0 | | | | | | | | | |
| 0 | 0 | 0 | 0 | 0 | | | | | | | | | |
| ITIH6- | 0 | 0 | 0 | 0 | 19*01 | CALSEDQFY | | | 6-1*01 | CASRPGGGS | | | 3449 |
| RLG | | | | | | F | | | | YNEQFF | | | 3958 |
| ITIH6- | 0 | 0 | 0 | 0 | | | | | | | | | |
| RLG | | | | | | | | | | | | | |

TABLE 10
Experiment 1

| | | Tetramer | SEQ ID |
|---|---|---|---|
| Peptide Name | Sequence | Fluorescence | NO: |
| NYESO1-V165 | SLLMWITQV | PE | 3964 |
| ADI-SVA | SVASTITGV | PE | 3965 |
| BRA-AG | WLLPGTSTV | PE | 3966 |
| BRA-NA | WLLPGTSTL | PE | 3967 |
| CD1-LLG | LLGATCMFV | PE | 3968 |
| GP100-IMD | IMDQVPFSV | PE | 3969 |
| GP100-AML | AMLGTHTMEV | PE | 3970 |
| GP100-ITD | ITDQVPFSV | PE | 3971 |
| GP100-KTW | KTWGQYWQV | PE | 3972 |
| GP100-YLE | YLEPGPVTA | PE | 3973 |
| GPC-FVG | FVGEFFTDV | PE | 3974 |
| HAFP-FMN | FMNKFIYEI | PE | 3975 |
| HAFP-GLS | GLSPNLNRFL | PE | 3976 |
| MAGEA10-GLY | GLYDGMEHL | PE | 3977 |
| MAGEC2-LLF | LLFGLALIEV | PE | 3978 |
| MART1-A2L | ELAGIGILTV | PE | 3979 |
| MART1-ALM | ALMDKSLHV | PE | 3980 |
| MG50-CMH | CMHLLLEAV | PE | 3981 |
| NYESO1-9A | SLLMWITQA | PE | 3982 |
| TYR-YMD | YMDGTMSQV | PE | 3983 |
| TYR-CLL | CLLWSFQTSA | PE | 3984 |
| WT1-RMF | RMFPNAPYL | PE | 3985 |
| AGL-GLI | QLIPCMDVV | PE | 3986 |
| EF2-ILT | ILTDITKGV | PE | 3987 |
| FBA-ALS | ALSDHHIYL | PE | 3988 |
| HA-VLH | VLHDDLLEA | PE | 3989 |
| KER-ALL | ALLNIKVKL | PE | 3990 |
| L19-ILM | ILMEHIHKL | PE | 3991 |
| PD5-KLS | KLSEGDLLA | PE | 3992 |
| PP1-SII | SIIGRLLEV | PE | 3993 |
| DDX5-YLL | YLLPAIVHI | PE | 3994 |
| SMCY-FID | FIDSYICQV | PE | 3995 |
| SNPG-IML | IMLEALERV | PE | 3996 |
| GAD-RMM | RMMEYGTTMV | PE | 3997 |
| GAD65-VMN | VMNILLQYVV | PE | 3998 |
| GFAP-NLA | NLAQTDLATV | PE | 3999 |
| HCHGA-LLC | LLCAGQVTAL | PE | 4000 |
| HCHGA-TLS | TLSKPSPMPV | PE | 4001 |
| IA2-MVW | MVWESGCTV | PE | 4002 |
| IA2-VIV | VIVMLTPLV | PE | 4003 |
| IA2-SLY | SLYHVYEVNL | PE | 4004 |
| IA2-SLS | SLSPLQAEL | PE | 4005 |
| IA2-SLA | SLAAGVKLL | PE | 4006 |
| IAPP-KLQ | KLQVFLIVL | PE | 4007 |
| IAPP-FLI | FLIVLSVAL | PE | 4008 |
| IGRP-VLF | VLFGLGFAI | PE | 4009 |
| IGRP-RLL | RLLCALTSL | PE | 4010 |
| IGRP-FLW | FLWSVFMLI | PE | 4011 |
| IGRP-FLF | FLFAVGFYL | PE | 4012 |
| INS-HLV | HLVEALYLV | PE | 4013 |
| INS-SHL | SHLVEALYLV | PE | 4014 |
| DRIP-MLY | MLYQHLLPL | PE | 4015 |
| PPI-15-23 | ALWGPDPAA | PE | 4016 |
| PPI-15-24 | ALWGPDPAAA | PE | 4017 |
| PPI-RLL | RLLPLLALL | PE | 4018 |
| PPI-ALVVM | ALWMRLLPL | PE | 4019 |
| ZNT8-VAA | VAANIVLTV | PE | 4020 |
| ZNT8-LLI | LLIDLTSFLL | PE | 4021 |
| ZNT8-LLS | LLSLFSLWL | PE | 4022 |
| ZNT8-WT | VVTGVLVYL | PE | 4023 |
| ZNT8-VMI | VMIIVSSLAV | PE | 4024 |
| ZNT8-ILA | ILAVDGVLSV | PE | 4025 |
| HCV-K1S | SLVALGINAV | APC | 4026 |
| HCV-K1Y | YLVALGINAV | APC | 4027 |
| HCV-K1Y17V | YLVALGVNAV | APC | 4028 |
| HCV-L2I | KIVALGINAV | APC | 4029 |
| HCV-KLV (WT) | KLVALGINAV | APC | 4030 |
| CMV-VLE | VLEETSVML | APC | 4031 |
| CMV-MLN | MLNIPSINV | APC | 4032 |
| CMV-NLV | NLVPMVATV | APC | 4033 |
| EBV-GLC | GLCTLVAML | APC | 4034 |
| EBV-YVL | YVLDHLIVV | APC | 4035 |
| EBV-YLQ | YLQQNWWTL | APC | 4036 |
| EBV-CLG | CLGGLLTMV | APC | 4037 |
| EBV-FLY | FLYALALLL | APC | 4038 |
| HCV-FLP | FLPSDFFPSV | APC | 4039 |
| HBV-WLS | WLSLLVPFV | APC | 4040 |
| HCV-YLL | YLLPRRGPRL | APC | 4041 |
| HCV-CIN | CINGVCWTV | APC | 4042 |
| HCV-LLF | LLFNILGGWV | APC | 4043 |
| HIV-ILK | ILKEPVHGV | APC | 4044 |
| HIV-SLY | SLYNTVATL | APC | 4045 |
| HPV-YML | YMLDLQPETT | APC | 4046 |
| HSV-SLP | SLPITVYYA | APC | 4047 |
| HTLV-GLL | GLLSLEEEL | APC | 4048 |
| HTLV-LLF | LLFGYPVYV | APC | 4049 |
| IV-AIM | AIMDKNIIL | APC | 4050 |
| IV-GIL | GILGFVFTL | APC | 4051 |
| IVPA-FMY | FMYSDFHFI | APC | 4052 |
| MEA-SMY | SMYRVFEVGV | APC | 4053 |
| MEA-ILP | ILPGQDLQYV | APC | 4054 |
| YFV-LLW | LLWNGPMAV | APC | 4055 |
| ALADH-VLM | VLMGGVPGVE | APC | 4056 |
| GLNS-GLL | GLLHHAPSL | APC | 4057 |
| SODA-DMW | DMWEHAFYL | APC | 4058 |
| Empty | EMPTY | APC | 4059 |

Experiment 2

| | | Tetramer | SEQ ID |
|---|---|---|---|
| Peptide Name | Sequence | Fluorescence | NO |
| NYESO1-V165 | SLLMWITQV | PE | 4060 |
| ADI-SVA | SVASTITGV | PE | 4061 |
| BRA-AG | WLLPGTSTV | PE | 4062 |
| BRA-NA | WLLPGTSTL | PE | 4063 |
| CD1-LLG | LLGATCMFV | PE | 4064 |
| GP100-IMD | IMDQVPFSV | PE | 4065 |
| GP100-AML | AMLGTHTMEV | PE | 4066 |
| GP100-ITD | ITDQVPFSV | PE | 4067 |
| GP100-KTW | KTWGQYWQV | PE | 4068 |
| GP100-YLE | YLEPGPVTA | PE | 4069 |
| GPC-FVG | FVGEFFTDV | PE | 4070 |
| HAFP-FMN | FMNKFIYEI | PE | 4071 |
| HAFP-GLS | GLSPNLNRFL | PE | 4072 |
| MAGEA10-GLY | GLYDGMEHL | PE | 4073 |
| MAGEC2-LLF | LLFGLALIEV | PE | 4074 |
| MART1-A2L | ELAGIGILTV | PE | 4075 |
| MART1-ALM | ALMDKSLHV | PE | 4076 |
| MG50-CMH | CMHLLLEAV | PE | 4077 |
| NYESO1-9A | SLLMWITQA | PE | 4078 |
| TYR-YMD | YMDGTMSQV | PE | 4079 |
| TYR-CLL | CLLWSFQTSA | PE | 4080 |
| WT1-RMF | RMFPNAPYL | PE | 4081 |
| AGL-GLI | QLIPCMDVV | PE | 4082 |
| EF2-ILT | ILTDITKGV | PE | 4083 |
| FBA-ALS | ALSDHHIYL | PE | 4084 |
| HA-VLH | VLHDDLLEA | PE | 4085 |
| KER-ALL | ALLNIKVKL | PE | 4086 |
| L19-ILM | ILMEHIHKL | PE | 4087 |
| PD5-KLS | KLSEGDLLA | PE | 4088 |
| PP1-SII | SIIGRLLEV | PE | 4089 |
| DDX5-YLL | YLLPAIVHI | PE | 4090 |
| SMCY-FID | FIDSYICQV | PE | 4091 |
| SNPG-IML | IMLEALERV | PE | 4092 |
| GAD-RMM | RMMEYGTTMV | PE | 4093 |
| GAD65-VMN | VMNILLQYVV | PE | 4094 |
| GFAP-NLA | NLAQTDLATV | PE | 4095 |
| HCHGA-LLC | LLCAGQVTAL | PE | 4096 |
| HCHGA-TLS | TLSKPSPMPV | PE | 4097 |
| IA2-MVW | MVWESGCTV | PE | 4098 |
| IA2-VIV | VIVMLTPLV | PE | 4099 |
| IA2-SLY | SLYHVYEVNL | PE | 4100 |
| IA2-SLS | SLSPLQAEL | PE | 4101 |
| IA2-SLA | SLAAGVKLL | PE | 4102 |
| IAPP-KLQ | KLQVFLIVL | PE | 4103 |
| IAPP-FLI | FLIVLSVAL | PE | 4104 |
| IGRP-VLF | VLFGLGFAI | PE | 4105 |
| IGRP-RLL | RLLCALTSL | PE | 4106 |
| IGRP-FLW | FLWSVFMLI | PE | 4107 |
| IGRP-FLF | FLFAVGFYL | PE | 4108 |
| INS-HLV | HLVEALYLV | PE | 4109 |
| INS-SHL | SHLVEALYLV | PE | 4110 |
| DRIP-MLY | MLYQHLLPL | PE | 4111 |
| PPI-15-23 | ALWGPDPAA | PE | 4112 |
| PPI-15-24 | ALWGPDPAAA | PE | 4113 |
| PPI-RLL | RLLPLLALL | PE | 4114 |
| PPI-ALVVM | ALVVMRLLPL | PE | 4115 |
| ZNT8-VAA | VAANIVLTV | PE | 4116 |
| ZNT8-LLI | LLIDLTSFLL | PE | 4117 |
| ZNT8-LLS | LLSLFSLWL | PE | 4118 |
| ZNT8-VVT | VVTGVLVYL | PE | 4119 |
| ZNT8-VMI | VMIIVSSLAV | PE | 4120 |
| ZNT8-ILA | ILAVDGVLSV | PE | 4121 |
| HCV-K1S | SLVALGINAV | APC | 4122 |
| HCV-K1Y | YLVALGINAV | APC | 4123 |
| HCV-K1Y17V | YLVALGVNAV | APC | 4124 |
| HCV-L21 | KIVALGINAV | APC | 4125 |
| HCV-KLV (WT) | KLVALGINAV | APC | 4126 |
| CMV-VLE | VLEETSVML | APC | 4127 |
| CMV-MLN | MLNIPSINV | APC | 4128 |
| CMV-NLV | NLVPMVATV | APC | 4129 |
| EBV-GLC | GLCTLVAML | APC | 4130 |
| EBV-YVL | YVLDHLIVV | APC | 4131 |
| EBV-YLQ | YLQQNWWTL | APC | 4132 |
| EBV-CLG | CLGGLLTMV | APC | 4133 |
| EBV-FLY | FLYALALLL | APC | 4134 |
| HCV-FLP | FLPSDFFPSV | APC | 4135 |
| HBV-WLS | WLSLLVPFV | APC | 4136 |
| HCV-YLL | YLLPRRGPRL | APC | 4137 |
| HCV-CIN | CINGVCVVTV | APC | 4138 |
| HCV-LLF | LLFNILGGVVV | APC | 4139 |
| HIV-ILK | ILKEPVHGV | APC | 4140 |
| HIV-SLY | SLYNTVATL | APC | 4141 |
| HPV-YML | YMLDLQPETT | APC | 4142 |
| HSV-SLP | SLPITVYYA | APC | 4143 |
| HTLV-GLL | GLLSLEEEL | APC | 4144 |
| HTLV-LLF | LLFGYPVYV | APC | 4145 |
| IV-AIM | AIMDKNIIL | APC | 4146 |
| IV-GIL | GILGFVFTL | APC | 4147 |
| IVPA-FMY | FMYSDFHFI | APC | 4148 |
| MEA-SMY | SMYRVFEVGV | APC | 4149 |
| MEA-ILP | ILPGQDLQYV | APC | 4150 |
| YFV-LLW | LLWNGPMAV | APC | 4151 |
| ALADH-VLM | VLMGGVPGVE | APC | 4152 |
| GLNS-GLL | GLLHHAPSL | APC | 4153 |
| SODA-DMW | DMWEHAFYL | APC | 4154 |
| HCV-A9N | KLVALGINNV | APC | 4155 |

Experiment 3

| | | Tetramer | SEQ ID |
|---|---|---|---|
| Peptide Name | Sequence | Fluorescence | NO |
| WDR46 | FLTYLDVSV | PE | 4156 |
| AHNAK | SMPDFDLHL | PE | 4157 |
| COL18A1 | VLLGVKLSGV | PE | 4158 |
| ERBB2 | ALIHHNTHL | PE | 4159 |
| TEAD1 (VLE) | VLENFTILLV | PE | 4160 |
| TEAD1 (SVL) | SVLENFTILL | PE | 4161 |
| NSDHL | ILTGLNYEA | PE | 4162 |
| GANAB | ALYGSVPVL | PE | 4163 |
| FNDC3B | VVLSWAPPV | PE | 4164 |
| GCN1L1 | ALLETLSLLL | PE | 4165 |
| MLL2 | ALSPVIPLI | PE | 4166 |
| SMARCD3 | KLFEFLVHGV | PE | 4167 |
| GNL3L | NLNRCSVPV | PE | 4168 |
| USP28 | LIIPCIHLI | PE | 4169 |
| MRM1 | LLFGMTPCL | PE | 4170 |
| SNX24 | KLSHQPVLL | PE | 4171 |
| PGM5 | AVGSHVYSV | PE | 4172 |
| SEC24A | FLYNPLTRV | PE | 4173 |
| AKAP13 | KLMNIQQQL | PE | 4174 |
| PABPC1 | MLGERLFPL | PE | 4175 |
| WDR46 T3I | FLIYLDVSV | APC | 4176 |
| AHNAK S1F | FMPDFDLHL | APC | 4177 |
| COL18A1 S8F | VLLGVKLFGV | APC | 4178 |
| ERBB2 H8Y | ALIHHNTYL | APC | 4179 |
| TEAD1 L8F | VLENFTIFLV | APC | 4180 |
| TEAD1 L9F | SVLENFTIFL | APC | 4181 |
| NSDHL A9V | ILTGLNYEV | APC | 4182 |
| GANAB S5F | ALYGFVPVL | APC | 4183 |
| FNDC3B L3M | VVMSWAPPV | APC | 4184 |
| GCN1L1 L6P | ALLETPSLLL | APC | 4185 |
| MLL2 L8H | ALSPVIPHI | APC | 4186 |
| SMARCD3 H8Y | KLFEFLVYGV | APC | 4187 |
| GNL3L R4C | NLNCCSVPV | APC | 4188 |
| USP28 C5F | LIIPFIHLI | APC | 4189 |
| MRM1 T6P | LLFGMPPCL | APC | 4190 |
| SNX24 P6L | KLSHQLVLL | APC | 4191 |
| PGM5 H5Y | AVGSYVYSV | APC | 4192 |
| SEC24A P5L | FLYNLLTRV | APC | 4193 |
| AKAP13 Q8K | KLMNIQQKL | APC | 4194 |
| PABPC1 R5Q | MLGEQLFPL | APC | 4195 |
| HCV-KLV (WT) | KLVALGINAV | PE | 4196 |
| HCV-KLV (WT) | KLVALGINAV | APC | 4197 |
| EMPTY | | APC | 4198 |
| EMPTY | | PE | 4199 |

Experiment 4

| | | Tetramer | SEQ ID |
|---|---|---|---|
| Peptide Name | Sequence | Fluorescence | NO |
| WDR46 | FLTYLDVSV | PE | 4200 |
| AHNAK | SMPDFDLHL | PE | 4201 |
| COL18A1 | VLLGVKLSGV | PE | 4202 |
| ERBB2 | ALIHHNTHL | PE | 4203 |
| TEAD1 (VLE) | VLENFTILLV | PE | 4204 |
| TEAD1 (SVL) | SVLENFTILL | PE | 4205 |
| NSDHL | ILTGLNYEA | PE | 4206 |
| GANAB | ALYGSVPVL | PE | 4207 |
| FNDC3B | VVLSWAPPV | PE | 4208 |
| GCN1L1 | ALLETLSLLL | PE | 4209 |
| MLL2 | ALSPVIPLI | PE | 4210 |
| SMARCD3 | KLFEFLVHGV | PE | 4211 |
| GNL3L | NLNRCSVPV | PE | 4212 |
| USP28 | LIIPCIHLI | PE | 4213 |
| MRM1 | LLFGMTPCL | PE | 4214 |
| SNX24 | KLSHQPVLL | PE | 4215 |
| PGM5 | AVGSHVYSV | PE | 4216 |
| SEC24A | FLYNPLTRV | PE | 4217 |
| AKAP13 | KLMNIQQQL | PE | 4218 |
| PABPC1 | MLGERLFPL | PE | 4219 |
| WDR46 T3I | FLIYLDVSV | APC | 4220 |
| AHNAK S1F | FMPDFDLHL | APC | 4221 |
| COL18A1 S8F | VLLGVKLFGV | APC | 4222 |
| ERBB2 H8Y | ALIHHNTYL | APC | 4223 |
| TEAD1 L8F | VLENFTIFLV | APC | 4224 |
| TEAD1 L9F | SVLENFTIFL | APC | 4225 |
| NSDHL A9V | ILTGLNYEV | APC | 4226 |
| GANAB S5F | ALYGFVPVL | APC | 4227 |
| FNDC3B L3M | VVMSWAPPV | APC | 4228 |
| GCN1L1 L6P | ALLETPSLLL | APC | 4229 |
| MLL2 L8H | ALSPVIPHI | APC | 4230 |
| SMARCD3 H8Y | KLFEFLVYGV | APC | 4231 |
| GNL3L R4C | NLNCCSVPV | APC | 4232 |
| USP28 C5F | LIIPFIHLI | APC | 4233 |
| MRM1 T6P | LLFGMPPCL | APC | 4234 |
| SNX24 P6L | KLSHQLVLL | APC | 4235 |
| PGM5 H5Y | AVGSYVYSV | APC | 4236 |
| SEC24A P5L | FLYNLLTRV | APC | 4237 |
| AKAP13 Q8K | KLMNIQQKL | APC | 4238 |
| PABPC1 R5Q | MLGEQLFPL | APC | 4239 |
| MAGE-A3 112-120 | KVAELVHFL | PE | 4240 |
| MAGE-A12 112-120 | KMAELVHFL | APC | 4241 |
| MAGE-A2 112-120 | KMVELVHFL | APC | 4242 |
| MAGE-A6 112-120 | KVAKLVHFL | APC | 4243 |

Experiment 5

| | | Tetramer | |
|---|---|---|---|
| Peptide Name | Sequence | Fluorescence | SEQ ID |
| A2ML1-YLD_K7R | YLDELIRNT | PE | 4244 |
| AGFG2-FLQ_S4S | FLQFRGNEV | PE | 4245 |
| AGXT2 L2-ILT_M5I | ILTDIEEKV | PE | 4246 |
| AHNAK-SMP_S1F | FMPDFDLHL | PE | 4247 |
| AKAP13-KLM_Q8K | KLMNIQQKL | PE | 4248 |
| APBB2-GML_L3F | GMFPVDKPV | PE | 4249 |
| APBB2-VQY_L7F | VQYLGMFPV | PE | 4250 |
| APCDD1L-RLP_R1W | WLPHVEYEL | PE | 4251 |
| ATP6AP1-KLG_G3W | KLWASPLHV | PE | 4252 |
| BAIAP3-ILN_V61 | ILNVDIFTL | PE | 4253 |
| BCL9L-FVY_T6I | FVYVFITHL | PE | 4254 |
| BTBD1-FML_LI | FMLLTQARI | PE | 4255 |
| C15orf32-MLS_G9R | MLSILALVRV | PE | 4256 |
| C17orf75-ALS_V7A | ALSYTPAEV | PE | 4257 |
| C1S-10_N1H | HLMDGDLGLI | PE | 4258 |
| C1S-9_N1H | HLMDGDLGL | PE | 4259 |
| C3orf58-LMV_L4P | LMVPHSPSL | PE | 4260 |
| CAMK1D-KLF_K8N | KLFEQILNA | PE | 4261 |
| CCM2-YML_R6H | YMLTLHTKL | PE | 4262 |
| CD47-GLT_V6F | GLTSFFIAI | PE | 4263 |
| CDC37L1-FLS_P6L | FLSDHLYLV | PE | 4264 |
| CELSR1-YLF_F3L | YLLAIFSGL | PE | 4265 |
| CHD8-KLN_P7A | KLNTITAVV | PE | 4266 |
| CHST13-VLV_V1M | MLVDDAHGL | PE | 4267 |
| CHST14-MLM_F4L | MLMLAVIVA | PE | 4268 |
| CLCN4-LLA_G8V | LLAGTLAVV | PE | 4269 |
| CNKSR1-SLA_A9V | SLAPLSPRV | PE | 4270 |
| COL18A1-VLL_S8F | VLLGVKLFGV | PE | 4271 |
| DCHS1-TLF_I5M | TLFTMVGTV | PE | 4272 |
| DHX33-LLA_K5T | LLAMTVPNV | PE | 4273 |
| DHX33-LLA_M4I | LLAIKVPNV | PE | 4274 |
| DNAH8-FMT_G7D | FMTKINDLEV | PE | 4275 |
| DOCK7-FLN_M9L | FLNDLLSVL | PE | 4276 |
| DOLPP1-GLM_A4V | GLMVIAWFI | PE | 4277 |
| DRAM1-FII_I3F | FIFSYVVAV | PE | 4278 |
| ERBB2-ALI_H8Y | ALIHHNTYL | PE | 4279 |
| EXOC3L4-ILL_V9I | ILLDWAANI | PE | 4280 |
| FAM47B-ALF_A1S | SLFSELSPV | PE | 4281 |
| FBXL4-SLL_L2V | SVLEYYTEL | PE | 4282 |
| FLNA-HIA_P6L | HIAKSLFEV | PE | 4283 |
| FNDC3B-VVL_L3M | VVMSWAPPV | PE | 4284 |
| GABRG3-TAM_L5I | TAMDIFVTV | PE | 4285 |
| GABRG3-YVT_L7I | YVTAMDIFV | PE | 4286 |
| GALC-YVV_V3L | YVLTWIVGA | PE | 4287 |
| GANAB-ALY_S5F | ALYGFVPVL | PE | 4288 |
| GCN1L1-10_L6P | ALLETPSLLL | PE | 4289 |
| GCN1L1-9_L6P | ALLETPSLL | PE | 4290 |
| GLRA1-LIF_F6L | LIFNMLYWI | PE | 4291 |
| GOLGA3-SLD_P4L | SLDLTTSPV | PE | 4292 |
| GPR137B-KMS_S3P | KMPLANIYL | PE | 4293 |
| GPR174-FSF_P4S | FSFSLDFLV | PE | 4294 |
| GSTA4-FLQ_E4K | FLQKYTVKL | PE | 4295 |
| HAUS3-ILN_T7A | ILNAMIAKI | PE | 4296 |
| HBZ-KLS_A7T | KLSELHTYI | PE | 4297 |
| HERC1-SLL_PS | SLLLLSVSV | PE | 4298 |
| HLA-DRB5-YMA_KE | YMAELTVTL | PE | 4299 |
| HOXC9-YMY_G4D | YMYDSPGEL | PE | 4300 |
| HTR1F-10_V1M | MMPFSIVYIV | PE | 4301 |
| HTR1F-9_V1M | MMPFSIVYI | PE | 4302 |
| HTR1F-LVM_V2M | LMMPFSIVYI | PE | 4303 |
| IGF1-TMS_S4F | TMSFSHLFYL | PE | 4304 |
| IL17RA-FIT_TM | FIMGISILL | PE | 4305 |
| INTS1-VLL_L3F | VLFHRAFLV | PE | 4306 |
| IPO9-FSS_E4D | FSSDVLNLV | PE | 4307 |
| ITIH6-RLG_G3V | RLVPYLEFL | PE | 4308 |
| KAT6A-KLS_MK | KLSREIKPV | PE | 4309 |
| KCNB2-LLA_P6T | LLAILTYYV | PE | 4310 |
| KCNC3-FLP_A7V | FLPDLNVNA | PE | 4311 |
| KIF20B-YTS_S6L | YTSEILSPI | PE | 4312 |
| LCP1-NLF_PL | NLFNRYLAL | PE | 4313 |
| MAR11-10_F1L | LLIASVTWLL | PE | 4314 |
| MAR11-9_F1L | LLIASVTWL | PE | 4315 |
| ME1-FLD_A8G | FLDEFMEGV | PE | 4316 |
| MLL2-ALS_L8H | ALSPVIPHI | PE | 4317 |
| MPV17-YLW A5P | YLWPPVQLA | PE | 4318 |
| MRGPRF-RLW_R1W | WLWEPLRVV | PE | 4319 |
| MRM1-10_T6P | LLFGMPPCLL | PE | 4320 |
| MRM1-9_T6P | LLFGMPPCL | PE | 4321 |
| MYH4-GLD_D3N | GLNETIAKL | PE | 4322 |
| MYPN-RVI_R1L | LVIGMPPPV | PE | 4323 |
| NBPF24-LLD_E6G | LLDEKGPEV | PE | 4324 |
| NOS1-FID_D3Y | FIYQYYSSI | PE | 4325 |
| NSDHL-ILT_A9V | ILTGLNYEV | PE | 4326 |
| OASL-ILD_DN | ILNPADPTL | PE | 4327 |
| OR10A3-ILI_V6F | ILIVMFPFL | PE | 4328 |
| OR14C36-FML_V6L | FMLYLLTLM | PE | 4329 |
| OR1G1-FLF_T8M | FLFMYLVMV | PE | 4330 |
| OR2T1-FLN_F5L | FLNVLFPLL | PE | 4331 |
| OR5K2-YIF_GE | YIFLENLAL | PE | 4332 |
| OR5M3-KMV_T8N | KMVAVFYNT | PE | 4333 |
| OR6F1-VLN_T8M | VLNPFIYML | PE | 4334 |
| OR8B8-YVN_V2L | YLNELVVFV | PE | 4335 |
| OR8D4-10_G3E | FLEIYTVTVV | PE | 4336 |
| OR8D4-9_G3E | FLEIYTVTV | PE | 4337 |
| OR9Q2-FLF_S8F | FLFTFFAFI | PE | 4338 |
| OR9Q2-SID_S1F | FIDCYLLAI | PE | 4339 |
| OVOL1-SLL_L9V | SLLQGSPHV | PE | 4340 |
| PABPC1-MLG_R5Q | MLGEQLFPL | PE | 4341 |
| PCDHB3-FLF_SL | FLFLVLLFV | PE | 4342 |
| PELP1-LVL_L3F | LVFPLVMGV | PE | 4343 |
| PELP1-RLH_L7F | RLHDLVFPL | PE | 4344 |
| PGM5-AVG_H5Y | AVGSYVYSV | PE | 4345 |
| PHKA2-LLS_SF | LLSIIFFPA | PE | 4346 |
| PIGN-FLT_P7H | FLTVFSHFM | PE | 4347 |
| PLXNB1-VLF_V1L | LLFAAFSSA | PE | 4348 |
| PRSS16-LLL_L1Q | QLLVSLWGL | PE | 4349 |
| PTCHD4-HQL_G5V | HQLGVVVEV | PE | 4350 |
| PXDNL-SIL_S1F | FILDAVQRV | PE | 4351 |
| REV3L-KLS_R6H | KLSEYHNSL | PE | 4352 |
| RRP1B-LLA_L7F | LLADQNFKFI | PE | 4353 |
| RYR3-VLN_E6K | VLNYFKPYL | PE | 4354 |
| SCN3A-ALV_P7S | ALVGAISSI | PE | 4355 |
| SEC24A-FLY_P5L | FLYNLLTRV | PE | 4356 |
| SH3RF2-HMV MI | HIVEISTPV | PE | 4357 |
| SHROOM2-KLL_D6V | KLLAGVEIV | PE | 4358 |
| SLC15A2-ILG_G4E | ILGEQVVHTV | PE | 4359 |
| SLC16A7-AMA_P6L | AMAGSLVFL | PE | 4360 |
| SLC1A2-YMS_S3P | YMPTTIIAA | PE | 4361 |
| SLC2A3-ILV_L9M | ILVAQIFGM | PE | 4362 |
| SLC2A4-ILI_A4T | ILITQVLGL | PE | 4363 |
| SLC38A1-RIW_W3L | RILAALFLGL | PE | 4364 |
| SLC39A4-LLG_G4S | LLGSVVTVLL | PE | 4365 |
| SMARCD3-KLF_H8Y | KLFEFLVYGV | PE | 4366 |
| SMOX-KLA_KN | KLANPLPYT | PE | 4367 |
| SNX24-KLS_P6L | KLSHQLVLL | PE | 4368 |
| SPOPN1471-FLL_N7I | FLLDEAIGL | PE | 4369 |
| SREBF1-YLQ_L6M | YLQDSMATT | PE | 4370 |
| SSPN-10_S9F | FLMASISSFL | PE | 4371 |
| SSPN-9_S9F | FLMASISSF | PE | 4372 |
| SSPN-LMA_S8F | LMASISSFL | PE | 4373 |
| ST6GALNAC2-LLF_Y6H | LLFALHFSA | PE | 4374 |
| STOX1-RLM_M31 | RLIKHYPGI | PE | 4375 |
| TAS1R2-FMS_A4S | FMSSYSGVL | PE | 4376 |
| TBX3-GMG_T8M | GMGPLLAMV | PE | 4377 |
| TEAD1-SVL_L9F | SVLENFTIFL | PE | 4378 |
| TEAD1-VLE_L8F | VLENFTIFLV | PE | 4379 |
| TEX2-FLM_K8N | FLMTLETNM | PE | 4380 |
| TMEM127-VTF_L9V | VTFAVSFYVV | PE | 4381 |
| TMEM195-ALS_S3L | ALLQVTLLL | PE | 4382 |
| TP73-YTP_P3S | YTSEHAASV | PE | 4383 |
| TPP2-SLA_WL | SLAETFLET | PE | 4384 |
| TRIM16-RMA_R1T | TMAAISNTV | PE | 4385 |
| TRIM58-VLA_V1F | FLASPSVPL | PE | 4386 |
| TRIM58-YMV_V3F | YMFLASPSV | PE | 4387 |
| TRPC1-MLL_Q5H | MLLKHDVSL | PE | 4388 |
| TRPV3-LLL_A8V | LLLNMLIVL | PE | 4389 |
| TRPV4-FMI_A6T | FMIGYTSAL | PE | 4390 |
| TRPV4-YLL_A9T | YLLFMIGYT | PE | 4391 |
| TTLL12-KLP_N7D | KLPLDIDPV | PE | 4392 |
| UNC13A-SQL_S1F | FQLNQSFEI | PE | 4393 |
| USP28-LII_C5F | LIIPFIHLI | PE | 4394 |
| VN1R2-LML_L3F | LMFWASSSI | PE | 4395 |
| VN1R5-MII_S7Y | MIISHLYLI | PE | 4396 |
| WDR46-FLT T3I | FLIYLDVSV | PE | 4397 |
| ZDHHC17-LLL_T4I | LLLIFNVSV | PE | 4398 |
| ZDHHC7-SLL_P7L | SLLWMNLFV | PE | 4399 |
| ZFP9O-FTQ_EK | FTQEKVVYHV | PE | 4400 |
| ZNF827-NLF_S4I | NLFIQDISV | PE | 4401 |
| HCV-KLV (PE) | KLVALGINAV | PE | 4402 |
| HCV-KLV (APC) | KLVALGINAV | APC | 4403 |
| EMPTY | | APC | 4404 |
| EMPTY | | PE | 4405 |

### Example 3

### 3′ End Sequencing of Highly Multiplexed Single Cell RNA-Seq Libraries

[0245] 3′ end sequencing of RNA transcripts is a robust and popular method for analyzing transcriptome expression within a population of cells as well as single cells, though multiplexed single cell transcriptome sequencing has proved challenging. Populations of seemingly homogenous populations of cells are known to have a great deal of heterogeneity in gene expression, confounding bulk transcriptome sequencing. Current methods of single cell sequencing attempt to address that problem, though these methods have a relatively low throughput and are extremely costly. 3′ enrichment is challenging in the currently available methods as both 3′ and 5′ ends have the same adaptor sequence. The ability to highly multiplex is also limited with the primers available.

[0246] To address these challenges, a new method of 3′ end sequencing of RNA-seq libraries was developed for highly multiplexed samples. cDNA amplification was performed essentially as in the SMART-SEQ2® protocol (Picelli et al., 2013) with several important modifications. A unique cell barcode is included in the reverse transcription (RT) primer, and a restriction digest (SalI) site is included in the template switching oligo (TSO) (Table 1) RT primers with unique cell barcodes were individually dispensed into each well of a 384-well PCR plate.

[0247] The workflow for the 3′ end sequencing is shown in FIG. 23A. Briefly, single cells are sorted into individual wells by indexed FACS sorting, and lysed. cDNA amplification is performed essentially as in the SMART-SEQ2® protocol, but with the primers listed above (Picelli et al., 2013). After cDNA amplification, multiple single cell PCR products are pooled, each of which already has unique cell barcode at the 3′ end. After purification, PCR products are digested by restriction enzyme incubation. Libraries are then prepared from the digested products using a modified NEXTERA® protocol in which custom primers designed to enrich 3′ end are used.

[0248] The libraries were then sequenced on an ILLUMINANEXTSEQ® to a depth of 500,000 reads. The data was then analyzed using custom scripts. It was found that inclusion of restriction enzyme digestion improved recovery of 3′ end sequences significantly over other 3′ selection methods, recovering between 80 and 89% of 3′ end sequences that have cell barcode information (Table 11). Enrichment was measured as the number of reads with all of the correct barcode sequences in read1 divided by the total raw reads.

TABLE 11
3′ end enrichment

| | Percentage of | Genome Mapping |
|---|---|---|
| Method | 3′ end enrichment | percentage |
| w/o restriction enzyme digestion* | 12.96% | 9.64% |
| w/restriction enzyme digestion | 80.02% | 37.39% |
| w/restriction enzyme digestion and | 89.06% | 43.53% |
| gel purification | | |

*customized NEXTERA ® PCR primer with four base pairs that are only complementary to the RT primer and mismatches to TSO

In addition to significantly enriching the 3′ ends of the transcripts, by using 384-well PCR plate the reaction volume is significantly decreased, while the ability to multiplex is significantly increased, compared to the original SMART-SEQ2® method.

[0249] Next, an ERCC spike-in was performed to validate this protocol 5n1 of 1:40,000 diluted ERCC were added into each well of sorted single cells. The data from the ERCC spike-in was then compared to published data. The method of 3′ end sequencing presented herein was shown to have a similar ERCC detection efficiency to published scRNA-seq data, demonstrating the reliability of this method (FIG. 23B). The correlation between the 3′ end-seq method presented herein and the original SMART-SEQ2® method was also found to be high (r²=0.924) when comparing normalized reads per million (RPM) (FIG. 23C).

[0250] Cross contamination during the 3′ end sequencing protocol was examined next. Human and Mouse cDNA were prepared separately according to the 3′ end sequencing method presented above, but with different cellular barcodes. The cDNAs were then mixed and sequenced as above. Sequencing data were mapped to human and mouse transcriptome respectively using Kallisto. The transcript mapping percentages were compared and it was found that there was a very low cross-contamination rate after sample pooling (FIG. 23D).

[0251] The methods disclosed herein allow for highly multiplexed RNA sequencing and will be increasingly valuable as scientists seek to understand and compare increasing numbers of single cells. As shown, these methods provide robust enhancement of 3′ ends of RNA for transcriptome profiling, and excellent multiplexing capabilities. 3′ end sequencing will also add another dimension to T cell profiling and can be incorporated into the TetTCR-seq workflow to assess the transcriptome of the targeted cells. These methods could be extended to methods with even greater multiplexing such as droplet and microwell based single cell RNA-seq or targeted amplification and sequencing selected genes, and digital PCR and sequencing methods.

### Example 4

Studies were Performed to Examine T Cell Antigen Binding and their Associated Activation and Phenotype in Human CD8 Cells.

[0252] In brief, each peptide barcode was individually in vitro transcribed/translated (IVTT) to generate corresponding peptide, which was later loaded onto MHC molecules. Then pMHC tetramer was tagged with its corresponding peptide barcode bearing a 3′ polyA overhang (FIG. 24). This enables the tetramer barcodes to be captured by BD RHAPSODY™ beads and can be processed together with mRNA through BD RHAPSODY™. Similar as BD RHAPSODY™ bioinformatic pipeline, peptide barcode sequencing reads from putative cells were extracted and mapped to peptide barcode reference. Only reads that are exact map were retained. The number of unique molecular identifiers (MIDs) was counted for each peptide barcode among individual cells.

[0253] Two passes were implemented to call tetramer specificity for each cell, in order to increase the precision. In the first pass, MID negative thresholds were then determined for foreign- and self-peptides respectively. Distribution of MID count aggregation was modeled through bimodal distribution. Specificities of putative tetramer positive cell were identified independently by inflection point of MID counts among all peptides. In the second pass, paired TCRa/b were further integrated with tetramer specificity called from first pass to correct for false positives and false negatives. It was assumed that T cells bearing same paired TCR a/P have the same tetramer specificity. Among T cells having multiple specificities (or tetramer negatives) associated with same TCR, their specificity was correct as the dominant tetramer specificity.

[0254] TetTCR-SeqHD was first applied on a mixture of polyclonal T cell populations, including IA2, PPI, GAD, HCV, HIV, FNDC3B-derived antigen specific clones (FIG. 25A-B). Over 80% of cells have paired TCR a/P (FIG. 25C). The peptide molecular counts were examined and three populations were easily observed, including self-antigen specific cells, foreign-antigen specific cells and a cross-reactive population (FIG. 25D). The TCR sequence of each cell represents its true tetramer specificity. After 1^{st} pass of tetramer specificity call, the precision of calling the correct tetramer specificity was found to be over 95% for all the clones with a FDR less than 5% (FIG. 26). Further analysis of the TCR sequences of each antigen specificity population recaptures the original distribution of TCR clonality (FIG. 27), further demonstrating the robustness of TetTCR-SeqHD to reveal the true identity of T cell antigen specificity.

[0255] After validation of TetTCR-SeqHD using T cell clones, this technology was further applied to study differences of foreign- and self-specific T cells from human primary CD8 T cells. A total of 80 self-specific peptides were curated through the IEDB database, as well as 33 influenza-, HIV-, EBV-, CVB, Rotaviruse- and HCV-derived peptides. Enriched CD8 T cells were processed from four different donors. The peptide molecular counts were evaluated with density plot and two populations were easily observed, self-antigen specific population and foreign-antigen specific population (FIG. 28A). Due to the low similarity of self- and foreign peptides, a significant cross-reactive population was not observed. Further, by applying self- and foreign peptide molecular count distribution, the negative threshold was bioinformatically inferred to call positive tetramer binding event for each experiment (FIG. 28B). The gene expression profiles for different antigen specificities were compared and it was found that self-antigen specific T cells are phenotypically different compared with foreign-antigen specific T cells (FIG. 29C-D). Moreover, TCR sequences were used to further prove the accuracy of antigen-specificity identification using pMHC DNA barcodes (FIG. 28E). The top 10 TCRs show minimal nosiy antigen-specificity identification other than the true identity. Meanwhile, the ratio between self- and foreign-antigen specific T cells identified by pMHC DNA barcodes resembles the ratio from flow cytometry data for all the donors (FIG. 28F).

[0256] Last, it was also demonstrated that proteogenomics profile can be investigated in combination with TetTCR-SeqHD, using DNA-labeled antibody sequencing, such as CITE-seq or REAP-seq or the commercially available DNA-labeled antibodies, such as BD Ab-seq products or BIOLEGEND® TotalSeq (FIG. 29) (Stoeckius et al., 2017). Using DNA-labeled antibody, primary CD8 T cells can be easily separated into naïve, central memory, effector memory, effector CD8 T cells using canonical antibodies such as CCR7, CD45RA, CD45RO and CD95.

[0257] The method disclosed here in can be applied to study the phenotypic profiles of antigen specific T cells in various diseases, including but not limited to autoimmune diseases, such as type 1 diabetes, multiple sclerosis, Rheumatoid arthritis, Lupus, Celiac disease and so on, various cancers, and infectious diseases.

[0258] All of the methods disclosed and claimed herein can be made and executed without undue experimentation in light of the present disclosure. While the compositions and methods of this invention have been described in terms of preferred embodiments, it will be apparent to those of skill in the art that variations may be applied to the methods and in the steps or in the sequence of steps of the method described herein without departing from the concept, spirit and scope of the invention. More specifically, it will be apparent that certain agents which are both chemically and physiologically related may be substituted for the agents described herein while the same or similar results would be achieved. All such similar substitutes and modifications apparent to those skilled in the art are deemed to be within the spirit, scope and concept of the invention as defined by the appended claims.

### REFERENCES

[0259] The following references, to the extent that they provide exemplary procedural or other details supplementary to those set forth herein, are specifically incorporated herein by reference.
[0260] Bentzen, A. K. et al. Nat Biotech 34, 1037-1045 (2016).
[0261] Bernard et al, Anal. Biochem., 273: 221-228 (1999).
[0262] Birnbaum, Michael E. et al. Cell 157, 1073-1087 (2014).
[0263] Bullock, T. N. J. et al. The Journal of Immunology 167, 5824-5831 (2001).
[0264] Cameron, B. J. et al. Science Translational Medicine 5, 197ra103-197ra103 (2013).
[0265] Carreno, B. M. et al. Science 348, 803-808 (2015).
[0266] Cohen, C. J. et al. The Journal of Clinical Investigation 125, 3981-3991 (2015).
[0267] Dietrich, P.-Y. et al. The Journal of Immunology 170, 5103-5109 (2003).
[0268] Dudley, M. E. et al. Science (New York, N.Y.) 298, 850-854 (2002).
[0269] Fu, G. K. et al. Analytical Chemistry 86, 2867-2870 (2014).
[0270] Glanville, J. et al. Nature 547, 94-98 (2017).
[0271] Lang, H. L. et al. Nature immunology 3, 940-943 (2002).
[0272] Luimstra et al., Journal of Experimental Medicine, 1-11 (2018).
[0273] Macoscko et al., Cell, 161(5): 1202-1214 (2015).
[0274] Mongkolsapaya, J. et al. Nat Med 9, 921-927 (2003).
[0275] Newell, E. W. & Davis, M. M. Nature biotechnology 32, 149-157 (2014).
[0276] Newell, E. W. et al. Nat Biotech 31, 623-629 (2013).
[0277] Peterson, V. M. et al. Nature Biotechnology 35, 936 (2017).
[0278] Picelli et al., Nature Methods, 10:1096-1098 (2013).
[0279] Picelli et al., Nature Protocols, 9(1): 171-181 (2014).
[0280] Rajasagi, M. et al. Blood 124, 453 (2014).
[0281] Ramskold et al., Nature Biotechnology, 30, 777-782 (2012).
[0282] Rodenko, B. et al. Nat. Protocols 1, 1120-1132 (2006).
[0283] Stoeckius et al., Nature Methods, 14, 865-868 (2017).
[0284] Stronen, E. et al. Science (2016).
[0285] Yu, W. et al. Immunity 42, 929-941 (2015).
[0286] Zhang, S.-Q. et al. Science Translational Medicine 8, 341ra377-341ra377 (2016).

1. A composition comprising a streptavidin tetramer backbone linked to a DNA handle, wherein the DNA handle is annealed to an oligonucleotide comprising a barcode, wherein the backbone is comprised of four protein subunits, wherein each protein subunit is linked to a Major Histocompatibility Complex associated with a peptide (pMHC).

2-3. (canceled)

4. The composition of claim 1, wherein the streptavidin backbone is further defined as a dimerization antibody or engineered antibody Fab′ that attaches to one or more MHC molecules on a peptide.

5. (canceled)

6. The composition of claim 4, wherein the universal moiety binds a tag bound to the peptide.

7. The composition of claim 6, wherein the tag is FLAG.

8-14. (canceled)

15. The composition of claim 1, wherein the DNA handle is an oligonucleotide comprising a molecular identifier and a barcode which has been annealed to the handle.

16. The composition of claim 1, wherein the barcode comprises 4-30 base pairs.

17-18. (canceled)

19. The composition of claim 1, wherein the DNA handle further comprises a partial FLAG sequence.

20. The composition of claim 1, wherein the DNA handle further comprises a protease-specific amino acid sequence.

21. The composition of claim 20, wherein the protease-specific amino acid sequence is IEGR or IDGR.

22. The composition of claim 15, wherein the DNA handle is further annealed to a second sequencing primer.

23. (canceled)

24. The composition of claim 1, wherein the DNA handle is linked to each backbone type.

25. The composition of claim 24, wherein the ratio of DNA handle to streptavidin backbone is between 0.1:1 to 20:1.

26. The composition of claim 1, wherein the streptavidin backbone is further linked to one or more detectable moieties.

27. The composition of claim 26, wherein the one or more detectable moieties comprise the barcode and/or a fluorophore.

28. The composition of claim 26, wherein the DNA handle or oligonucleotide is linked to the detectable label or streptavidin.

29. The composition of claim 28, wherein the DNA handle is covalently linked to the detectable label.

30. The composition of claim 29, wherein the covalent link is a HyNic-4FB crosslink.

31. The composition of claim 29, wherein the covalent link is a Tetrazine-TCO crosslink.

32-33. (canceled)

34. The composition of claim 1, wherein the oligonucleotide encodes a peptide identical to the peptide of the pMHC monomers.

35. The composition of claim 26, wherein the detectable moieties are attached to the streptavidin backbone.

36. The composition of claim 26, wherein the one or more detectable moieties are fluorophores.

37. The composition of claim 36, wherein the fluorophore is a PE, PE-Cy5, PE-Cy7, APC, APC-Cy7, Qdot 565, qdot 605, Qdot 655, Qdot 705, Brilliant Violet (BV) 421, BV 605, BV 510, BV 711, BV786, PerCP, PerCP/Cy5.5, Alexa Fluor 488, Alexa Fluor 647, FITC, BV570, BV650, Dylight 488, Dylight 649, and/or PE/Dazzle 594.

38. (canceled)

39. The composition of claim 12, wherein the sequence of the DNA handle is constant and the sequence of the peptide-encoding oligonucleotide is variable.

40. The composition of claim 1, wherein the pMHC monomers are biotinylated.

41. The composition of claim 40, wherein the pMHC monomers are attached to the streptavidin by streptavidin-biotin interaction.

42-43. (canceled)

44. The composition of claim 1, wherein the peptide-encoding oligonucleotide comprises DNA.

45. The composition of claim 1, wherein the peptide-encoding oligonucleotide further comprises a 5′ primer region and/or a 3′ primer region.

46-212. (canceled)

213. The composition of claim 1, wherein the composition binds one or more T-cell receptors (TCR).

214. The composition of claim 213, wherein the TCR is on a CD8+ or CD4+ T cell or has been derived from a T-cell and expressed on another cell type.

215. The composition of claim 1, wherein the peptide is generated using in vitro transcription and translation (IVTT) or chemically synthesized.

216. The composition of claim 1, wherein the composition further comprises an anti-CD8a antibody.

217. The composition of claim 216, wherein the anti-CD8a antibody comprises RPA-T8.

218. The composition of claim 4, further wherein a peptide with a universal moiety can be incorporated into the MHC.

The application's sequence listing, which the Patent Office published only in electronic form, follows.

SEQUENCE LISTING (4405 sequences)

SEQ ID NO: 1 - DNA, 52 bp, synthetic construct
  misc_feature 1..52: note = Description of sequence: Primer
  modified_base 1: mod_base = OTHER; note = Modified with a 12-carbon terminal end and 18-atom hexa-ethyleneglycol spacer
  variation 27..37: note = n is a, c, g, or t
  source 1..52: mol_type = other DNA
tagtactcagaggttgatctacattgnnnnnnnnnnngacgatgacgacaag

SEQ ID NO: 2 - DNA, 67 bp, synthetic construct
  misc_feature 1..67: note = Description of sequence: Primer
  source 1..67: mol_type = other DNA
gcgaattaatacgactcactatagggcttaagtataaggaggaaaacatatggacgatgacgacaag

SEQ ID NO: 3 - DNA, 47 bp, synthetic construct
  misc_feature 1..47: note = Description of sequence: Primer
  source 1..47: mol_type = other DNA
aaacccctccgtttagagaggggttatgctagcgaggtgcttcgtta

SEQ ID NO: 4 - DNA, 20 bp, synthetic construct
  misc_feature 1..20: note = Description of sequence: Primer
  source 1..20: mol_type = other DNA
tcagaggttgatctacattg

SEQ ID NO: 5 - DNA, 17 bp, synthetic construct
  misc_feature 1..17: note = Description of sequence: Primer
  source 1..17: mol_type = other DNA
agcgaggtgcttcgtta

SEQ ID NO: 6 - DNA, 54 bp, synthetic construct
  misc_feature 1..54: note = Description of sequence: Primer
  variation 21: note = n is a, c, g, or t
  variation 23: note = n is a, c, g, or t
  variation 25: note = n is a, c, g, or t
  source 1..54: mol_type = other DNA
gacgtgtgctcttccgatctnhnhnatcacgtactcagaggttgatctacattg

SEQ ID NO: 7 - DNA, 54 bp, synthetic construct
  misc_feature 1..54: note = Description of sequence: Primer
  variation 21: note = n is a, c, g, or t
  variation 23: note = n is a, c, g, or t
  variation 25: note = n is a, c, g, or t
  source 1..54: mol_type = other DNA
gacgtgtgctcttccgatctnhnhncgatgttactcagaggttgatctacattg

SEQ ID NO: 8 - DNA, 54 bp, synthetic construct
  misc_feature 1..54: note = Description of sequence: Primer
  variation 21: note = n is a, c, g, or t
  variation 23: note = n is a, c, g, or t
  variation 25: note = n is a, c, g, or t
  source 1..54: mol_type = other DNA
gacgtgtgctcttccgatctnhnhnttaggctactcagaggttgatctacattg

SEQ ID NO: 9 - DNA, 54 bp, synthetic construct
  misc_feature 1..54: note = Description of sequence: Primer
  variation 21: note = n is a, c, g, or t
  variation 23: note = n is a, c, g, or t
  variation 25: note = n is a, c, g, or t
  source 1..54: mol_type = other DNA
gacgtgtgctcttccgatctnhnhntgaccatactcagaggttgatctacattg

SEQ ID NO: 10 - DNA, 54 bp, synthetic construct
  misc_feature 1..54: note = Description of sequence: Primer
  variation 21: note = n is a, c, g, or t
  variation 23: note = n is a, c, g, or t
  variation 25: note = n is a, c, g, or t
  source 1..54: mol_type = other DNA
gacgtgtgctcttccgatctnhnhnacagtgtactcagaggttgatctacattg

SEQ ID NO: 11 - DNA, 54 bp, synthetic construct
  misc_feature 1..54: note = Description of sequence: Primer
  variation 21: note = n is a, c, g, or t
  variation 23: note = n is a, c, g, or t
  variation 25: note = n is a, c, g, or t
  source 1..54: mol_type = other DNA
gacgtgtgctcttccgatctnhnhngccaattactcagaggttgatctacattg

SEQ ID NO: 12 - DNA, 54 bp, synthetic construct
  misc_feature 1..54: note = Description of sequence: Primer
  variation 21: note = n is a, c, g, or t
  variation 23: note = n is a, c, g, or t
  variation 25: note = n is a, c, g, or t
  source 1..54: mol_type = other DNA
gacgtgtgctcttccgatctnhnhncagatctactcagaggttgatctacattg

SEQ ID NO: 13 - DNA, 54 bp, synthetic construct
  misc_feature 1..54: note = Description of sequence: Primer
  variation 21: note = n is a, c, g, or t
  variation 23: note = n is a, c, g, or t
  variation 25: note = n is a, c, g, or t
  source 1..54: mol_type = other DNA
gacgtgtgctcttccgatctnhnhnacttgatactcagaggttgatctacattg

SEQ ID NO: 14 - DNA, 54 bp, synthetic construct
  misc_feature 1..54: note = Description of sequence: Primer
  variation 21: note = n is a, c, g, or t
  variation 23: note = n is a, c, g, or t
  variation 25: note = n is a, c, g, or t
  source 1..54: mol_type = other DNA
gacgtgtgctcttccgatctnhnhngatcagtactcagaggttgatctacattg

SEQ ID NO: 15 - DNA, 54 bp, synthetic construct
  misc_feature 1..54: note = Description of sequence: Primer
  variation 21: note = n is a, c, g, or t
  variation 23: note = n is a, c, g, or t
  variation 25: note = n is a, c, g, or t
  source 1..54: mol_type = other DNA
gacgtgtgctcttccgatctnhnhntagctttactcagaggttgatctacattg

SEQ ID NO: 16 - DNA, 54 bp, synthetic construct
  misc_feature 1..54: note = Description of sequence: Primer
  variation 21: note = n is a, c, g, or t
  variation 23: note = n is a, c, g, or t
  variation 25: note = n is a, c, g, or t
  source 1..54: mol_type = other DNA
gacgtgtgctcttccgatctnhnhnggctactactcagaggttgatctacattg

SEQ ID NO: 17 - DNA, 54 bp, synthetic construct
  misc_feature 1..54: note = Description of sequence: Primer
  variation 21: note = n is a, c, g, or t
  variation 23: note = n is a, c, g, or t
  variation 25: note = n is a, c, g, or t
  source 1..54: mol_type = other DNA
gacgtgtgctcttccgatctnhnhncttgtatactcagaggttgatctacattg

SEQ ID NO: 18 - DNA, 60 bp, synthetic construct
  misc_feature 1..60: note = Description of sequence: Primer
  variation 34: note = n is a, c, g, or t
  variation 36: note = n is a, c, g, or t
  variation 38: note = n is a, c, g, or t
  source 1..60: mol_type = other DNA
acactctttccctacacgacgctcttccgatctnhnhntcaagagcgaggtgcttcgtta

SEQ ID NO: 19 - DNA, 60 bp, synthetic construct
  misc_feature 1..60: note = Description of sequence: Primer
  variation 34: note = n is a, c, g, or t
  variation 36: note = n is a, c, g, or t
  variation 38: note = n is a, c, g, or t
  source 1..60: mol_type = other DNA
acactctttccctacacgacgctcttccgatctnhnhnaacacagcgaggtgcttcgtta

SEQ ID NO: 20 - DNA, 60 bp, synthetic construct
  misc_feature 1..60: note = Description of sequence: Primer
  variation 34: note = n is a, c, g, or t
  variation 36: note = n is a, c, g, or t
  variation 38: note = n is a, c, g, or t
  source 1..60: mol_type = other DNA
acactctttccctacacgacgctcttccgatctnhnhnacataagcgaggtgcttcgtta

SEQ ID NO: 21 - DNA, 60 bp, synthetic construct
  misc_feature 1..60: note = Description of sequence: Primer
  variation 34: note = n is a, c, g, or t
  variation 36: note = n is a, c, g, or t
  variation 38: note = n is a, c, g, or t
  source 1..60: mol_type = other DNA
acactctttccctacacgacgctcttccgatctnhnhntaagaagcgaggtgcttcgtta

SEQ ID NO: 22 - DNA, 60 bp, synthetic construct; identical to SEQ ID NO: 18
  misc_feature 1..60: note = Description of sequence: Primer
  variation 34: note = n is a, c, g, or t
  variation 36: note = n is a, c, g, or t
  variation 38: note = n is a, c, g, or t
  source 1..60: mol_type = other DNA

SEQ ID NO: 23 - DNA, 60 bp, synthetic construct
  misc_feature 1..60: note = Description of sequence: Primer
  variation 34: note = n is a, c, g, or t
  variation 36: note = n is a, c, g, or t
  variation 38: note = n is a, c, g, or t
  source 1..60: mol_type = other DNA
acactctttccctacacgacgctcttccgatctnhnhnagtttagcgaggtgcttcgtta

SEQ ID NO: 24 - DNA, 60 bp, synthetic construct
  misc_feature 1..60: note = Description of sequence: Primer
  variation 34: note = n is a, c, g, or t
  variation 36: note = n is a, c, g, or t
  variation 38: note = n is a, c, g, or t
  source 1..60: mol_type = other DNA
acactctttccctacacgacgctcttccgatctnhnhnatacaagcgaggtgcttcgtta

SEQ ID NO: 25 - DNA, 60 bp, synthetic construct
  misc_feature 1..60: note = Description of sequence: Primer
  variation 34: note = n is a, c, g, or t
  variation 36: note = n is a, c, g, or t
  variation 38: note = n is a, c, g, or t
  source 1..60: mol_type = other DNA
acactctttccctacacgacgctcttccgatctnhnhnttatgagcgaggtgcttcgtta

SEQ ID NO: 26 - DNA, 45 bp, synthetic construct
  misc_feature 1..45: note = Description of sequence: Primer
  source 1..45: mol_type = other DNA
aatgatacggcgaccaccgagatctacactctttccctacacgac

SEQ ID NO: 27 - DNA, 66 bp, synthetic construct
  misc_feature 1..66: note = Description of sequence: Primer
  variation 27..32: note = n is a, c, g, or t
  source 1..66: mol_type = other DNA
caagcagaagacggcatacgagataannnnnngtgactggagttcagacgtgtgctcttccgatct

SEQ ID NO: 28 - DNA, 57 bp, synthetic construct
  misc_feature 1..57: note = Description of sequence: Primer
  source 1..57: mol_type = other DNA
cgaggtgcttcgttacaggatgatgtttttgtccatgatagccttgtcgtcatcgtc

SEQ ID NO: 29 - DNA, 57 bp, synthetic construct
  misc_feature 1..57: note = Description of sequence: Primer
  source 1..57: mol_type = other DNA
cgaggtgcttcgttacagtttaactttgatgttcagcagagccttgtcgtcatcgtc

SEQ ID NO: 30 - DNA, 57 bp, synthetic construct
  misc_feature 1..57: note = Description of sequence: Primer
  source 1..57: mol_type = other DNA
cgaggtgcttcgttaaacgtgcagagatttgtccatcagagccttgtcgtcatcgtc

SEQ ID NO: 31 - DNA, 57 bp, synthetic construct
  misc_feature 1..57: note = Description of sequence: Primer
  source 1..57: mol_type = other DNA
cgaggtgcttcgttacaggtagatgtggtggtcagacagagccttgtcgtcatcgtc

SEQ ID NO: 32 - DNA, 57 bp, synthetic construct
  misc_feature 1..57: note = Description of sequence: Primer
  source 1..57: mol_type = other DNA
cgaggtgcttcgttatgctgcaggatcaggaccccacagtgccttgtcgtcatcgtc

SEQ ID NO: 33 - DNA, 60 bp, synthetic construct
  misc_feature 1..60: note = Description of sequence: Primer
  source 1..60: mol_type = other DNA
cgaggtgcttcgttaagctgctgccggatcaggaccccacagtgccttgtcgtcatcgtc

SEQ ID NO: 34 - DNA, 57 bp, synthetic construct
  misc_feature 1..57: note = Description of sequence: Primer
  source 1..57: mol_type = other DNA
cgaggtgcttcgttacagcggcagcagacgcatccacagagccttgtcgtcatcgtc

SEQ ID NO: 35 - DNA, 60 bp, synthetic construct
  misc_feature 1..60: note = Description of sequence: Primer
  source 1..60: mol_type = other DNA
cgaggtgcttcgttaaacttccatcgtgtgggtgcccagcatagccttgtcgtcatcgtc

SEQ ID NO: 36 - DNA, 57 bp, synthetic construct
  misc_feature 1..57: note = Description of sequence: Primer
  source 1..57: mol_type = other DNA
cgaggtgcttcgttaaacggtccagcaaacaccattgatgcacttgtcgtcatcgtc

SEQ ID NO: 37 - DNA, 57 bp, synthetic construct
  misc_feature 1..57: note = Description of sequence: Primer
  source 1..57: mol_type = other DNA
cgaggtgcttcgttaaaccatcgtcagcagaccacccaggcacttgtcgtcatcgtc

SEQ ID NO: 38 - DNA, 60 bp, synthetic construct
  misc_feature 1..60: note = Description of sequence: Primer
  source 1..60: mol_type = other DNA
cgaggtgcttcgttatgcagaggtctggaaactccacagcaggcacttgtcgtcatcgtc

SEQ ID NO: 39 - DNA, 57 bp, synthetic construct
  misc_feature 1..57: note = Description of sequence: Primer
  source 1..57: mol_type = other DNA
cgaggtgcttcgttaaacagcttccagcagcaggtgcatacacttgtcgtcatcgtc

SEQ ID NO: 40 - DNA, 57 bp, synthetic construct
  misc_feature 1..57: note = Description of sequence: Primer
  source 1..57: mol_type = other DNA
cgaggtgcttcgttacaggtagaatgcgtgttcccacatatccttgtcgtcatcgtc

SEQ ID NO: 41 - DNA, 60 bp, synthetic construct
  misc_feature 1..60: note = Description of sequence: Primer
  source 1..60: mol_type = other DNA
cgaggtgcttcgttaaacggtcaggataccgataccagccagttccttgtcgtcatcgtc

SEQ ID NO: 42 - DNA, 57 bp, synthetic construct
  misc_feature 1..57: note = Description of sequence: Primer
  source 1..57: mol_type = other DNA
cgaggtgcttcgttaaacctggcagatgtaagagtcaatgaacttgtcgtcatcgtc

SEQ ID NO: 43 - DNA, 57 bp, synthetic construct
  misc_feature 1..57: note = Description of sequence: Primer
  source 1..57: mol_type = other DNA
cgaggtgcttcgttacaggtagaaaccaacagcgaacaggaacttgtcgtcatcgtc

SEQ ID NO: 44 - DNA, 57 bp, synthetic construct
  misc_feature 1..57: note = Description of sequence: Primer
  source 1..57: mol_type = other DNA
cgaggtgcttcgttacagagcaacagacagaacgatcaggaacttgtcgtcatcgtc

SEQ ID NO: 45 - DNA, 60 bp, synthetic construct
  misc_feature 1..60: note = Description of sequence: Primer
  source 1..60: mol_type = other DNA
cgaggtgcttcgttaaacagacgggaagaagtcagacggcaggaacttgtcgtcatcgtc

SEQ ID NO: 46 - DNA, 57 bp, synthetic construct
  misc_feature 1..57: note = Description of sequence: Primer
  source 1..57: mol_type = other DNA
cgaggtgcttcgttagatcagcatgaaaacagaccacaggaacttgtcgtcatcgtc

SEQ ID NO: 47 - DNA, 57 bp, synthetic construct
  misc_feature 1..57: note = Description of sequence: Primer
  source 1..57: mol_type = other DNA
cgaggtgcttcgttacagcagcagagccagagcgtacaggaacttgtcgtcatcgtc

SEQ ID NO: 48 - DNA, 57 bp, synthetic construct
  misc_feature 1..57: note = Description of sequence: Primer
  source 1..57: mol_type = other DNA
cgaggtgcttcgttagatttcgtagatgaatttgttcataaacttgtcgtcatcgtc

SEQ ID NO: 49 - DNA, 57 bp, synthetic construct
  misc_feature 1..57: note = Description of sequence: Primer
  source 1..57: mol_type = other DNA
cgaggtgcttcgttagatgaagtggaagtcagagtacatgaacttgtcgtcatcgtc

SEQ ID NO: 50 - DNA, 57 bp, synthetic construct
  misc_feature 1..57: note = Description of sequence: Primer
  source 1..57: mol_type = other DNA
cgaggtgcttcgttaaacgtcggtaaagaattcacccacaaacttgtcgtcatcgtc

SEQ ID NO: 51 - DNA, 57 bp, synthetic construct
  misc_feature 1..57: note = Description of sequence: Primer
  source 1..57: mol_type = other DNA
cgaggtgcttcgttacagggtgaaaacaaaacccagaatgcccttgtcgtcatcgtc

SEQ ID NO: 52 - DNA, 57 bp, synthetic construct
  misc_feature 1..57: note = Description of sequence: Primer
  source 1..57: mol_type = other DNA
cgaggtgcttcgttacagcatagcaaccagcgtgcacaggcccttgtcgtcatcgtc

SEQ ID NO: 53 - DNA, 57 bp, synthetic construct
  misc_feature 1..57: note = Description of sequence: Primer
  source 1..57: mol_type = other DNA
cgaggtgcttcgttacagagacggagcgtggtgcagcagacccttgtcgtcatcgtc

SEQ ID NO: 54 - DNA, 57 bp, synthetic construct
  misc_feature 1..57: note = Description of sequence: Primer
  source 1..57: mol_type = other DNA
cgaggtgcttcgttacagttcttcttccagagacagcagacccttgtcgtcatcgtc

SEQ ID NO: 55 - DNA, 60 bp, synthetic construct
  misc_feature 1..60: note = Description of sequence: Primer
  source 1..60: mol_type = other DNA
cgaggtgcttcgttacaggaaacggttcaggttcggagacagacccttgtcgtcatcgtc

SEQ ID NO: 56 - DNA, 57 bp, synthetic construct
  misc_feature 1..57: note = Description of sequence: Primer
  source 1..57: mol_type = other DNA
cgaggtgcttcgttacaggtgttccataccgtcgtacagacccttgtcgtcatcgtc

SEQ ID NO: 57 - DNA, 57 bp, synthetic construct
  misc_feature 1..57: note = Description of sequence: Primer
  source 1..57: mol_type = other DNA
cgaggtgcttcgttaaaccaggtacagagcttcaaccaggtgcttgtcgtcatcgtc

SEQ ID NO: 58 - DNA, 60 bp, synthetic construct
  misc_feature 1..60: note = Description of sequence: Primer
  source 1..60: mol_type = other DNA
cgaggtgcttcgttaaacagacagaacaccgtcaacagccaggatcttgtcgtcatcgtc

SEQ ID NO: 59 - DNA, 57 bp, synthetic construct
  misc_feature 1..57: note = Description of sequence: Primer
  source 1..57: mol_type = other DNA
cgaggtgcttcgttaaacaccgtgcaccggctctttcaggatcttgtcgtcatcgtc

SEQ ID NO: 60 - DNA, 57 bp, synthetic construct
  misc_feature 1..57: note = Description of sequence: Primer
  source 1..57: mol_type = other DNA
cgaggtgcttcgttacagtttgtggatgtgttccatcaggatcttgtcgtcatcgtc

SEQ ID NO: 61 - DNA, 60 bp, synthetic construct
  misc_feature 1..60: note = Description of sequence: Primer
  source 1..60: mol_type = other DNA
cgaggtgcttcgttaaacgtattgcagatcttgacccggcaggatcttgtcgtcatcgtc

SEQ ID NO: 62 - DNA, 57 bp, synthetic construct
  misc_feature 1..57: note = Description of sequence: Primer
  source 1..57: mol_type = other DNA
cgaggtgcttcgttaaacgcctttggtgatgtcggtcaggatcttgtcgtcatcgtc

SEQ ID NO: 63 - DNA, 57 bp, synthetic construct
  misc_feature 1..57: note = Description of sequence: Primer
  source 1..57: mol_type = other DNA
cgaggtgcttcgttaaacagagaacggaacctggtccatgatcttgtcgtcatcgtc

SEQ ID NO: 64 - DNA, 57 bp, synthetic construct
  misc_feature 1..57: note = Description of sequence: Primer
  source 1..57: mol_type = other DNA
cgaggtgcttcgttaaacacgttccagggcttccagcatgatcttgtcgtcatcgtc

SEQ ID NO: 65 - DNA, 57 bp, synthetic construct
  misc_feature 1..57: note = Description of sequence: Primer
  source 1..57: mol_type = other DNA
cgaggtgcttcgttaaacagaaaacggaacttgatcggtgatcttgtcgtcatcgtc

SEQ ID NO: 66 - DNA, 60 bp, synthetic construct
  misc_feature 1..60: note = Description of sequence: Primer
  source 1..60: mol_type = other DNA
cgaggtgcttcgttaaacagcgttaatacccagagcaacaattttcttgtcgtcatcgtc

SEQ ID NO: 67 - DNA, 57 bp, synthetic construct
  misc_feature 1..57: note = Description of sequence: Primer
  source 1..57: mol_type = other DNA
cgaggtgcttcgttacagaacaatcaggaacacttgcagtttcttgtcgtcatcgtc

SEQ ID NO: 68 - DNA, 57 bp, synthetic construct
  misc_feature 1..57: note = Description of sequence: Primer
  source 1..57: mol_type = other DNA
cgaggtgcttcgttaagccagcaggtcaccttcagacagtttcttgtcgtcatcgtc

SEQ ID NO: 69 - DNA, 60 bp, synthetic construct
  misc_feature 1..60: note = Description of sequence: Primer
  source 1..60: mol_type = other DNA
cgaggtgcttcgttaaacagcgttgatacccagagcaaccagtttcttgtcgtcatcgtc

SEQ ID NO: 70 - DNA, 60 bp, synthetic construct
  misc_feature 1..60: note = Description of sequence: Primer
  source 1..60: mol_type = other DNA
cgaggtgcttcgttacacattgttgatacccagtgcaaccagtttcttgtcgtcatcgtc

SEQ ID NO: 71 - DNA, 57 bp, synthetic construct
  misc_feature 1..57: note = Description of sequence: Primer
  source 1..57: mol_type = other DNA
cgaggtgcttcgttacacttgccaatactgaccccaggttttcttgtcgtcatcgtc

SEQ ID NO: 72 - DNA, 60 bp, synthetic construct
  misc_feature 1..60: note = Description of sequence: Primer
  source 1..60: mol_type = other DNA
cgaggtgcttcgttacagagcggtaacctgaccagcgcacagcagcttgtcgtcatcgtc

SEQ ID NO: 73 - DNA, 60 bp, synthetic construct
  misc_feature 1..60: note = Description of sequence: Primer
  source 1..60: mol_type = other DNA
cgaggtgcttcgttaaacttcgatcagagccagaccgaacagcagcttgtcgtcatcgtc

SEQ ID NO: 74 - DNA, 57 bp, synthetic construct
  misc_feature 1..57: note = Description of sequence: Primer
  source 1..57: mol_type = other DNA
cgaggtgcttcgttacacataaaccgggtaaccaaacagcagcttgtcgtcatcgtc

SEQ ID NO: 75 - DNA, 60 bp, synthetic construct
  misc_feature 1..60: note = Description of sequence: Primer
  source 1..60: mol_type = other DNA
cgaggtgcttcgttaaacccagccacccaggatgttgaacagcagcttgtcgtcatcgtc

SEQ ID NO: 76 - DNA, 57 bp, synthetic construct
  misc_feature 1..57: note = Description of sequence: Primer
  source 1..57: mol_type = other DNA
cgaggtgcttcgttaaacaaacatgcaggttgcgcccagcagcttgtcgtcatcgtc

SEQ ID NO: 77 - DNA, 60 bp, synthetic construct
  misc_feature 1..60: note = Description of sequence: Primer
  source 1..60: mol_type = other DNA
cgaggtgcttcgttacagcaggaaagaggtcaggtcgatcagcagcttgtcgtcatcgtc

SEQ ID NO: 78 - DNA, 57 bp, synthetic construct
  misc_feature 1..57: note = Description of sequence: Primer
  source 1..57: mol_type = other DNA
cgaggtgcttcgttacagccacagagagaacagagacagcagcttgtcgtcatcgtc

SEQ ID NO: 79 - DNA, 57 bp, synthetic construct
  misc_feature 1..57: note = Description of sequence: Primer
  source 1..57: mol_type = other DNA
cgaggtgcttcgttaaacagccatcggaccgttccacagcagcttgtcgtcatcgtc

SEQ ID NO: 80 - DNA, 57 bp, synthetic construct
  misc_feature 1..57: note = Description of sequence: Primer
  source 1..57: mol_type = other DNA
cgaggtgcttcgttaaacattgatagacgggatgttcagcatcttgtcgtcatcgtc

SEQ ID NO: 81 - DNA, 57 bp, synthetic construct
  misc_feature 1..57: note = Description of sequence: Primer
  source 1..57: mol_type = other DNA
cgaggtgcttcgttacagcggcagcaggtgctggtacagcatcttgtcgtcatcgtc

SEQ ID NO: 82 - DNA, 57 bp, synthetic construct
  misc_feature 1..57: note = Description of sequence: Primer
  source 1..57: mol_type = other DNA
cgaggtgcttcgttaaacggtgcaaccagattcccaaaccatcttgtcgtcatcgtc

SEQ ID NO: 83 - DNA, 60 bp, synthetic construct
  misc_feature 1..60: note = Description of sequence: Primer
  source 1..60: mol_type = other DNA
cgaggtgcttcgttaaacggtagccaggtcggtctgagccaggttcttgtcgtcatcgtc

SEQ ID NO: 84 - DNA, 57 bp, synthetic construct
  misc_feature 1..57: note = Description of sequence: Primer
  source 1..57: mol_type = other DNA
cgaggtgcttcgttaaacggtagcaaccatcggaaccaggttcttgtcgtcatcgtc

SEQ ID NO: 85 - DNA, 57 bp, synthetic construct
  misc_feature 1..57: note = Description of sequence: Primer
  source 1..57: mol_type = other DNA
cgaggtgcttcgttaaacaacatccatgcacgggatcagctgcttgtcgtcatcgtc

SEQ ID NO: 86 - DNA, 57 bp, synthetic construct
  misc_feature 1..57: note = Description of sequence: Primer
  source 1..57: mol_type = other DNA
cgaggtgcttcgttacagagaggtcagagcgcacagcagacgcttgtcgtcatcgtc

SEQ ID NO: 87 - DNA, 57 bp, synthetic construct
  misc_feature 1..57: note = Description of sequence: Primer
  source 1..57: mol_type = other DNA
cgaggtgcttcgttacagcagagccagcagcggcagcagacgcttgtcgtcatcgtc

SEQ ID NO: 88 - DNA, 57 bp, synthetic construct
  misc_feature 1..57: note = Description of sequence: Primer
  source 1..57: mol_type = other DNA
cgaggtgcttcgttacaggtacggtgcgttcgggaacatgcgcttgtcgtcatcgtc

SEQ ID NO: 89 - DNA, 60 bp, synthetic construct
  misc_feature 1..60: note = Description of sequence: Primer
  source 1..60: mol_type = other DNA
cgaggtgcttcgttaaaccatcgtggtgccatattccatcatacgcttgtcgtcatcgtc

SEQ ID NO: 90 - DNA, 60 bp, synthetic construct
  misc_feature 1..60: note = Description of sequence: Primer
  source 1..60: mol_type = other DNA
cgaggtgcttcgttaaaccaggtacagagcttcaaccagatgtgacttgtcgtcatcgtc

SEQ ID NO: 91 - DNA, 57 bp, synthetic construct
  misc_feature 1..57: note = Description of sequence: Primer
  source 1..57: mol_type = other DNA
cgaggtgcttcgttaaacttccagcagacggccaatgatagacttgtcgtcatcgtc

SEQ ID NO: 92 - DNA, 57 bp, synthetic construct
  misc_feature 1..57: note = Description of sequence: Primer
  source 1..57: mol_type = other DNA
cgaggtgcttcgttacagcagtttaacaccagcagccagagacttgtcgtcatcgtc

SEQ ID NO: 93 - DNA, 57 bp, synthetic construct
  misc_feature 1..57: note = Description of sequence: Primer
  source 1..57: mol_type = other DNA
cgaggtgcttcgttaagcctgggtgatccacatcagcagagacttgtcgtcatcgtc

SEQ ID NO: 94 - DNA, 57 bp, synthetic construct
  misc_feature 1..57: note = Description of sequence: Primer
  source 1..57: mol_type = other DNA
cgaggtgcttcgttaaacctgggtgatccacatcagcagagacttgtcgtcatcgtc

SEQ ID NO: 95 - DNA, 57 bp, synthetic construct
  misc_feature 1..57: note = Description of sequence: Primer
  source 1..57: mol_type = other DNA
cgaggtgcttcgttaagcgtagtaaacggtgatcggcagagacttgtcgtcatcgtc

SEQ ID NO: 96 - DNA, 57 bp, synthetic construct
  misc_feature 1..57: note = Description of sequence: Primer
  source 1..57: mol_type = other DNA
cgaggtgcttcgttacagttcagcctgcagcggagacagagacttgtcgtcatcgtc

SEQ ID NO: 97 - DNA, 60 bp, synthetic construct
  misc_feature 1..60: note = Description of sequence: Primer
  source 1..60: mol_type = other DNA
cgaggtgcttcgttaaacagcgttgatacccagagcaaccagagacttgtcgtcatcgtc

SEQ ID NO: 98 - DNA, 60 bp, synthetic construct
  misc_feature 1..60: note = Description of sequence: Primer
  source 1..60: mol_type = other DNA
cgaggtgcttcgttacaggttaacttcgtaaacgtggtacagagacttgtcgtcatcgtc

SEQ ID NO: 99 - DNA, 57 bp, synthetic construct
  misc_feature 1..57: note = Description of sequence: Primer
  source 1..57: mol_type = other DNA
cgaggtgcttcgttacagggtagccacggtgttatacagagacttgtcgtcatcgtc

SEQ ID NO: 100 - DNA, 60 bp, synthetic construct
  misc_feature 1..60: note = Description of sequence: Primer
  source 1..60: mol_type = other DNA
cgaggtgcttcgttaaacgccaacttcaaaaacacggtacatagacttgtcgtcatcgtc

SEQ ID NO: 101 - DNA, 57 bp, synthetic construct
  misc_feature 1..57: note = Description of sequence: Primer
  source 1..57: mol_type = other DNA
cgaggtgcttcgttaaacacccgtaatggtactagcaacagacttgtcgtcatcgtc

SEQ ID NO: 102 - DNA, 60 bp, synthetic construct
  misc_feature 1..60: note = Description of sequence: Primer
  source 1..60: mol_type = other DNA
cgaggtgcttcgttaaacaggcatcggagacggttttgacagggtcttgtcgtcatcgtc

SEQ ID NO: 103 - DNA, 57 bp, synthetic construct
  misc_feature 1..57: note = Description of sequence: Primer
  source 1..57: mol_type = other DNA
cgaggtgcttcgttaaacggtcagaacaatgttagcagcaaccttgtcgtcatcgtc

SEQ ID NO: 104 - DNA, 57 bp, synthetic construct
  misc_feature 1..57: note = Description of sequence: Primer
  source 1..57: mol_type = other DNA
cgaggtgcttcgttaaaccagcggggtcagcataacaataaccttgtcgtcatcgtc

SEQ ID NO: 105 - DNA, 57 bp, synthetic construct
  misc_feature 1..57: note = Description of sequence: Primer
  source 1..57: mol_type = other DNA
cgaggtgcttcgttacagcataacagaggtttcttccagaaccttgtcgtcatcgtc

SEQ ID NO: 106 - DNA, 57 bp, synthetic construct
  misc_feature 1..57: note = Description of sequence: Primer
  source 1..57: mol_type = other DNA
cgaggtgcttcgttagatagcgaaacccagaccgaacagaaccttgtcgtcatcgtc

SEQ ID NO: 107 - DNA, 57 bp, synthetic construct
  misc_feature 1..57: note = Description of sequence: Primer
  source 1..57: mol_type = other DNA
cgaggtgcttcgttatgcttccagcaggtcgtcgtgcagaaccttgtcgtcatcgtc

SEQ ID NO: 108 - DNA, 60 bp, synthetic construct
  misc_feature 1..60: note = Description of sequence: Primer
  source 1..60: mol_type = other DNA
cgaggtgcttcgttattcaacacccggaacaccacccatcagaaccttgtcgtcatcgtc

SEQ ID NO: 109 - DNA, 60 bp, synthetic construct
  misc_feature 1..60: note = Description of sequence: Primer
  source 1..60: mol_type = other DNA
cgaggtgcttcgttaaacagccagagaagaaacaataatcataaccttgtcgtcatcgtc

SEQ ID NO: 110 - DNA, 60 bp, synthetic construct
  misc_feature 1..60: note = Description of sequence: Primer
  source 1..60: mol_type = other DNA
cgaggtgcttcgttaaaccacgtattgcagcaggatgttcataaccttgtcgtcatcgtc

SEQ ID NO: 111 - DNA, 57 bp, synthetic construct
  misc_feature 1..57: note = Description of sequence: Primer
  source 1..57: mol_type = other DNA
cgaggtgcttcgttagaggtacaccagaacaccagtaacaaccttgtcgtcatcgtc

SEQ ID NO: 112 - DNA, 57 bp, synthetic construct
  misc_feature 1..57: note = Description of sequence: Primer
  source 1..57: mol_type = other DNA
cgaggtgcttcgttacagggttgaagtgcccggcagtaaccacttgtcgtcatcgtc

SEQ ID NO: 113 - DNA, 57 bp, synthetic construct
  misc_feature 1..57: note = Description of sequence: Primer
  source 1..57: mol_type = other DNA
cgaggtgcttcgttaaacagtagaagtacccggcagtaaccacttgtcgtcatcgtc

SEQ ID NO: 114 - DNA, 57 bp, synthetic construct
  misc_feature 1..57: note = Description of sequence: Primer
  source 1..57: mol_type = other DNA
cgaggtgcttcgttaaacaaacggaaccagcagagacagccacttgtcgtcatcgtc

SEQ ID NO: 115 - DNA, 57 bp, synthetic construct
  misc_feature 1..57: note = Description of sequence: Primer
  source 1..57: mol_type = other DNA
cgaggtgcttcgttaagcggtaaccggaccaggttccaggtacttgtcgtcatcgtc

SEQ ID NO: 116 - DNA, 57 bp, synthetic construct
  misc_feature 1..57: note = Description of sequence: Primer
  source 1..57: mol_type = other DNA
cgaggtgcttcgttagatgtgcacgatagccggtaacaggtacttgtcgtcatcgtc

SEQ ID NO: 117 - DNA, 60 bp, synthetic construct
  misc_feature 1..60: note = Description of sequence: Primer
  source 1..60: mol_type = other DNA
cgaggtgcttcgttacagacgcggaccacgacgaggcagcaggtacttgtcgtcatcgtc

SEQ ID NO: 118 - DNA, 57 bp, synthetic construct
  misc_feature 1..57: note = Description of sequence: Primer
  source 1..57: mol_type = other DNA
cgaggtgcttcgttacagggtccaccagttctgctgcaggtacttgtcgtcatcgtc

SEQ ID NO: 119 - DNA, 60 bp, synthetic construct
  misc_feature 1..60: note = Description of sequence: Primer
  source 1..60: mol_type = other DNA
cgaggtgcttcgttaaacagcgttgatacccagagcaaccaggtacttgtcgtcatcgtc

SEQ ID NO: 120 - DNA, 60 bp, synthetic construct
  misc_feature 1..60: note = Description of sequence: Primer
  source 1..60: mol_type = other DNA
cgaggtgcttcgttaaacagcgttaacacccagagcaaccaggtacttgtcgtcatcgtc

SEQ ID NO: 121 - DNA, 57 bp, synthetic construct
  misc_feature 1..57: note = Description of sequence: Primer
  source 1..57: mol_type = other DNA
cgaggtgcttcgttaaacctgagacatggtgccatccatatacttgtcgtcatcgtc

SEQ ID NO: 122 - DNA, 60 bp, synthetic construct
  misc_feature 1..60: note = Description of sequence: Primer
  source 1..60: mol_type = other DNA
cgaggtgcttcgttaggtggtttccggctgcaggtccagcatgtacttgtcgtcatcgtc

SEQ ID NO: 123 - DNA, 57 bp, synthetic construct
  misc_feature 1..57: note = Description of sequence: Primer
  source 1..57: mol_type = other DNA
cgaggtgcttcgttaaacaacaatcaggtggtccagaacatacttgtcgtcatcgtc

SEQ ID NO: 124 - DNA, 57 bp, synthetic construct
  misc_feature 1..57: note = Description of sequence: Primer
  source 1..57: mol_type = other DNA
cgaggtgcttcgttaaacagaaacatccaggtagatcaggaacttgtcgtcatcgtc

SEQ ID NO: 125 - DNA, 57 bp, synthetic construct
  misc_feature 1..57: note = Description of sequence: Primer
  source 1..57: mol_type = other DNA
cgaggtgcttcgttacaggtgcaggtcaaagtccggcatgaacttgtcgtcatcgtc

SEQ ID NO: 126 - DNA, 60 bp, synthetic construct
  misc_feature 1..60: note = Description of sequence: Primer
  source 1..60: mol_type = other DNA
cgaggtgcttcgttaaacaccgaacagtttaacacccagcagaaccttgtcgtcatcgtc

SEQ ID NO: 127 - DNA, 57 bp, synthetic construct
  misc_feature 1..57: note = Description of sequence: Primer
  source 1..57: mol_type = other DNA
cgaggtgcttcgttacaggtaggtgttgtggtggatcagagccttgtcgtcatcgtc

SEQ ID NO: 128 - DNA, 60 bp, synthetic construct
  misc_feature 1..60: note = Description of sequence: Primer
  source 1..60: mol_type = other DNA
cgaggtgcttcgttaaaccaggaagatggtgaagttttccagaaccttgtcgtcatcgtc

SEQ ID NO: 129 - DNA, 60 bp, synthetic construct
  misc_feature 1..60: note = Description of sequence: Primer
  source 1..60: mol_type = other DNA
cgaggtgcttcgttacaggaagatggtgaagttttccagaacagacttgtcgtcatcgtc

SEQ ID NO: 130 - DNA, 57 bp, synthetic construct
  misc_feature 1..57: note = Description of sequence: Primer
  source 1..57: mol_type = other DNA
cgaggtgcttcgttaaacttcgtagttcaggccggtcaggatcttgtcgtcatcgtc

SEQ ID NO: 131 - DNA, 57 bp, synthetic construct
  misc_feature 1..57: note = Description of sequence: Primer
  source 1..57: mol_type = other DNA
cgaggtgcttcgttacagaaccggaacaaaaccgtacagagccttgtcgtcatcgtc

SEQ ID NO: 132 - DNA, 57 bp, synthetic construct
  misc_feature 1..57: note = Description of sequence: Primer
  source 1..57: mol_type = other DNA
cgaggtgcttcgttaaaccggcggagcccaagacataacaaccttgtcgtcatcgtc

SEQ ID NO: 133 - DNA, 60 bp, synthetic construct
  misc_feature 1..60: note = Description of sequence: Primer
  source 1..60: mol_type = other DNA
cgaggtgcttcgttacagcagcagagacggggtttccagcagagccttgtcgtcatcgtc

SEQ ID NO: 134 - DNA, 57 bp, synthetic construct
  misc_feature 1..57: note = Description of sequence: Primer
  source 1..57: mol_type = other DNA
cgaggtgcttcgttagatgtgcgggataaccggagacagagccttgtcgtcatcgtc

SEQ ID NO: 135 - DNA, 60 bp, synthetic construct
  misc_feature 1..60: note = Description of sequence: Primer
  source 1..60: mol_type = other DNA
cgaggtgcttcgttaaacaccgtaaaccaggaattcaaacagtttcttgtcgtcatcgtc

SEQ ID NO: 136 - DNA, 57 bp, synthetic construct
  misc_feature 1..57: note = Description of sequence: Primer
  source 1..57: mol_type = other DNA
cgaggtgcttcgttaaaccggaacagagcagcaattcaggttcttgtcgtcatcgtc

SEQ ID NO: 137 - DNA, 57 bp, synthetic construct
  misc_feature 1..57: note = Description of sequence: Primer
  source 1..57: mol_type = other DNA
cgaggtgcttcgttagatcaggtggatgaacgggataatcagcttgtcgtcatcgtc

SEQ ID NO: 138 - DNA, 57 bp, synthetic construct
  misc_feature 1..57: note = Description of sequence: Primer
  source 1..57: mol_type = other DNA
cgaggtgcttcgttacagacacggcggcataccaaacagcagcttgtcgtcatcgtc

SEQ ID NO: 139 - DNA, 57 bp, synthetic construct
  misc_feature 1..57: note = Description of sequence: Primer
  source 1..57: mol_type = other DNA
cgaggtgcttcgttacagcagaaccagttgatgagacagtttcttgtcgtcatcgtc

SEQ ID NO: 140 - DNA, 57 bp, synthetic construct
  misc_feature 1..57: note = Description of sequence: Primer
  source 1..57: mol_type = other DNA
cgaggtgcttcgttaaacagagtaaacgtaagaaccaacagccttgtcgtcatcgtc

SEQ ID NO: 141 - DNA, 57 bp, synthetic construct
  misc_feature 1..57: note = Description of sequence: Primer
  source 1..57: mol_type = other DNA
cgaggtgcttcgttaaacacgggtcagcaggttatacaggaacttgtcgtcatcgtc

SEQ ID NO: 142 - DNA, 57 bp, synthetic construct
  misc_feature 1..57: note = Description of sequence: Primer
  source 1..57: mol_type = other DNA
cgaggtgcttcgttacagtttctgctggatgttcatcagtttcttgtcgtcatcgtc

SEQ ID NO: 143 - DNA, 57 bp, synthetic construct
  misc_feature 1..57: note = Description of sequence: Primer
  source 1..57: mol_type = other DNA
cgaggtgcttcgttacagcggaaacagttgttcacccagcatcttgtcgtcatcgtc

SEQ ID NO: 144 - DNA, 57 bp, synthetic construct
  misc_feature 1..57: note = Description of sequence: Primer
  source 1..57: mol_type = other DNA
cgaggtgcttcgttaaacagaaacgtccaggtaggtcaggaacttgtcgtcatcgtc

SEQ ID NO: 145 - DNA, 57 bp, synthetic construct
  misc_feature 1..57: note = Description of sequence: Primer
  source 1..57: mol_type = other DNA
cgaggtgcttcgttacaggtgcaggtcgaagtccggcatagacttgtcgtcatcgtc

SEQ ID NO: 146 - DNA, 60 bp, synthetic construct
  misc_feature 1..60: note = Description of sequence: Primer
  source 1..60: mol_type = other DNA
cgaggtgcttcgttacacaccagacagtttcacacccagcagaaccttgtcgtcatcgtc

SEQ ID NO: 147 - DNA, 57 bp, synthetic construct
  misc_feature 1..57: note = Description of sequence: Primer
  source 1..57: mol_type = other DNA
cgaggtgcttcgttacaggtgggtgttgtggtggatcagagccttgtcgtcatcgtc

SEQ ID NO: 148 - DNA, 60 bp, synthetic construct
  misc_feature 1..60: note = Description of sequence: Primer
  source 1..60: mol_type = other DNA
cgaggtgcttcgttaaaccagcaggatggtgaagttttccagaaccttgtcgtcatcgtc

SEQ ID NO: 149 - DNA, 60 bp, synthetic construct
  misc_feature 1..60: note = Description of sequence: Primer
  source 1..60: mol_type = other DNA
cgaggtgcttcgttacagcaggatggtgaagttttccagaacagacttgtcgtcatcgtc

SEQ ID NO: 150 - DNA, 57 bp, synthetic construct
  misc_feature 1..57: note = Description of sequence: Primer
  source 1..57: mol_type = other DNA
cgaggtgcttcgttatgcttcgtagttcagaccagtcaggatcttgtcgtcatcgtc

SEQ ID NO: 151 - DNA, 57 bp, synthetic construct
  misc_feature 1..57: note = Description of sequence: Primer
  source 1..57: mol_type = other DNA
cgaggtgcttcgttacagaaccggaacagaaccgtacagagccttgtcgtcatcgtc

SEQ ID NO: 152 - DNA, 57 bp, synthetic construct
  misc_feature 1..57: note = Description of sequence: Primer
  source 1..57: mol_type = other DNA
cgaggtgcttcgttaaaccggcggagcccaagacagaacaaccttgtcgtcatcgtc

SEQ ID NO: 153 - DNA, 60 bp, synthetic construct
  misc_feature 1..60: note = Description of sequence: Primer
  source 1..60: mol_type = other DNA
cgaggtgcttcgttacagcagcagagacagggtttccagcagagccttgtcgtcatcgtc

SEQ ID NO: 154 - DNA, 57 bp, synthetic construct
  misc_feature 1..57: note = Description of sequence: Primer
  source 1..57: mol_type = other DNA
cgaggtgcttcgttagatcagcgggataaccggagacagagccttgtcgtcatcgtc

SEQ ID NO: 155 - DNA, 60 bp, synthetic construct
  misc_feature 1..60: note = Description of sequence: Primer
  source 1..60: mol_type = other DNA
cgaggtgcttcgttacacaccgtgaaccaggaactcgaacagtttcttgtcgtcatcgtc

SEQ ID NO: 156 - DNA, 57 bp, synthetic construct
  misc_feature 1..57: note = Description of sequence: Primer
  source 1..57: mol_type = other DNA
cgaggtgcttcgttaaaccggaacagagcaacggttcaggttcttgtcgtcatcgtc

SEQ ID NO: 157 - DNA, 57 bp, synthetic construct
  misc_feature 1..57: note = Description of sequence: Primer
  source 1..57: mol_type = other DNA
cgaggtgcttcgttagatcaggtggatgcacgggataatcagcttgtcgtcatcgtc

SEQ ID NO: 158 - DNA, 57 bp, synthetic construct
  misc_feature 1..57: note = Description of sequence: Primer
  source 1..57: mol_type = other DNA
cgaggtgcttcgttacaggcacggggtcataccgaacagcagcttgtcgtcatcgtc

SEQ ID NO: 159 - DNA, 57 bp, synthetic construct
  misc_feature 1..57: note = Description of sequence: Primer
  source 1..57: mol_type = other DNA
cgaggtgcttcgttacagcagaaccggctggtgagacagtttcttgtcgtcatcgtc

SEQ ID NO: 160 - DNA, 57 bp, synthetic construct
  misc_feature 1..57: note = Description of sequence: Primer
  source 1..57: mol_type = other DNA
cgaggtgcttcgttaaacagagtaaacgtgagaaccaacagccttgtcgtcatcgtc

SEQ ID NO: 161 - DNA, 57 bp, synthetic construct
  misc_feature 1..57: note = Description of sequence: Primer
  source 1..57: mol_type = other DNA
cgaggtgcttcgttaaacacgggtcagcgggttatacaggaacttgtcgtcatcgtc

SEQ ID NO: 162 - DNA, 57 bp, synthetic construct
  misc_feature 1..57: note = Description of sequence: Primer
  source 1..57: mol_type = other DNA
cgaggtgcttcgttacagttgctgctggatgttcatcagtttcttgtcgtcatcgtc

SEQ ID NO: 163 - DNA, 57 bp, synthetic construct
  misc_feature 1..57: note = Description of sequence: Primer
  source 1..57: mol_type = other DNA
cgaggtgcttcgttacagcgggaacagacgttcacccagcatcttgtcgtcatcgtc

SEQ ID NO: 164 - DNA, 57 bp, synthetic construct
  misc_feature 1..57: note = Description of sequence: Primer
  source 1..57: mol_type = other DNA
cgaggtgcttcgttacaggaagtgaaccagttcagcaactttcttgtcgtcatcgtc

SEQ ID NO: 165 - DNA, 57 bp, synthetic construct
  misc_feature 1..57: note = Description of sequence: Primer
  source 1..57: mol_type = other DNA
cgaggtgcttcgttacaggaagtgaaccagttcagccattttcttgtcgtcatcgtc

SEQ ID NO: 166 - DNA, 57 bp, synthetic construct
  misc_feature 1..57: note = Description of sequence: Primer
  source 1..57: mol_type = other DNA
cgaggtgcttcgttacaggaagtgaaccagttcaaccattttcttgtcgtcatcgtc

SEQ ID NO: 167 - DNA, 57 bp, synthetic construct
  misc_feature 1..57: note = Description of sequence: Primer
  source 1..57: mol_type = other DNA
cgaggtgcttcgttacaggaagtgaaccagtttagcaactttcttgtcgtcatcgtc

SEQ ID NO: 168 - DNA, 57 bp, synthetic construct
  misc_feature 1..57: note = Description of sequence: Primer
  source 1..57: mol_type = other DNA
cgaggtgcttcgttaggtgaaacgcacaaatgcaaacaggcgcttgtcgtcatcgtc

SEQ ID NO: 169 - DNA, 57 bp, synthetic construct
  misc_feature 1..57: note = Description of sequence: Primer
  source 1..57: mol_type = other DNA
cgaggtgcttcgttaggtgttacggatcagttcatccaggtacttgtcgtcatcgtc

SEQ ID NO: 170 - DNA, 57 bp, synthetic construct
  misc_feature 1..57: note = Description of sequence: Primer
  source 1..57: mol_type = other DNA
cgaggtgcttcgttaaacttcgttaccacggaattgcaggaacttgtcgtcatcgtc

SEQ ID NO: 171 - DNA, 57 bp, synthetic construct
  misc_feature 1..57: note = Description of sequence: Primer
  source 1..57: mol_type = other DNA
cgaggtgcttcgttaaactttttcttcaatatcggtcaggatcttgtcgtcatcgtc

SEQ ID NO: 172 - DNA, 57 bp, synthetic construct
  misc_feature 1..57: note = Description of sequence: Primer
  source 1..57: mol_type = other DNA
cgaggtgcttcgttacaggtgcaggtcaaaatccggcatgaacttgtcgtcatcgtc

SEQ ID NO: 173 - DNA, 57 bp, synthetic construct
  misc_feature 1..57: note = Description of sequence: Primer
  source 1..57: mol_type = other DNA
cgaggtgcttcgttacagcttctgttggatgttcatcagtttcttgtcgtcatcgtc

SEQ ID NO: 174 - DNA, 57 bp, synthetic construct
  misc_feature 1..57: note = Description of sequence: Primer
  source 1..57: mol_type = other DNA
cgaggtgcttcgttaaacaggtttgtcaaccggaaacatacccttgtcgtcatcgtc

SEQ ID NO: 175 - DNA, 57 bp, synthetic construct
  misc_feature 1..57: note = Description of sequence: Primer
  source 1..57: mol_type = other DNA
cgaggtgcttcgttaaaccggaaacatacccagatactgaaccttgtcgtcatcgtc

SEQ ID NO: 176 - DNA, 57 bp, synthetic construct
  misc_feature 1..57: note = Description of sequence: Primer
  source 1..57: mol_type = other DNA
cgaggtgcttcgttacagttcatattccacatgcggtaaccacttgtcgtcatcgtc

SEQ ID NO: 177 - DNA, 57 bp, synthetic construct
  misc_feature 1..57: note = Description of sequence: Primer
  source 1..57: mol_type = other DNA
cgaggtgcttcgttaaacgtgcaacggagatgcccacagtttcttgtcgtcatcgtc

SEQ ID NO: 178 - DNA, 57 bp, synthetic construct
  misc_feature 1..57: note = Description of sequence: Primer
  source 1..57: mol_type = other DNA
cgaggtgcttcgttacagggtgaagatgtccacattcaggatcttgtcgtcatcgtc

SEQ ID NO: 179 - DNA, 57 bp, synthetic construct
  misc_feature 1..57: note = Description of sequence: Primer
  source 1..57: mol_type = other DNA
cgaggtgcttcgttacaggtgggtaatgaaaacgtaaacaaacttgtcgtcatcgtc

SEQ ID NO: 180 - DNA, 57 bp, synthetic construct
  misc_feature 1..57: note = Description of sequence: Primer
  source 1..57: mol_type = other DNA
cgaggtgcttcgttaaatacgtgcctgggtcagcagcatgaacttgtcgtcatcgtc

SEQ ID NO: 181 - DNA, 60 bp, synthetic construct
  misc_feature 1..60: note = Description of sequence: Primer
  source 1..60: mol_type = other DNA
cgaggtgcttcgttacacacgtactaaggccagaattgacagcatcttgtcgtcatcgtc

SEQ ID NO: 182 - DNA, 57 bp, synthetic construct
  misc_feature 1..57: note = Description of sequence: Primer
  source 1..57: mol_type = other DNA
cgaggtgcttcgttaaacttctgccggggtgtaagacagagccttgtcgtcatcgtc

SEQ ID NO: 183 - DNA, 60 bp, synthetic construct
  misc_feature 1..60: note = Description of sequence: Primer
  source 1..60: mol_type = other DNA
cgaggtgcttcgttagatcagacccaggtcaccgtccatcagatgcttgtcgtcatcgtc

SEQ ID NO: 184 - DNA, 57 bp, synthetic construct
  misc_feature 1..57: note = Description of sequence: Primer
  source 1..57: mol_type = other DNA
cgaggtgcttcgttacagacccaggtcaccgtccatcagatgcttgtcgtcatcgtc

SEQ ID NO: 185 - DNA, 57 bp, synthetic construct
  misc_feature 1..57: note = Description of sequence: Primer
  source 1..57: mol_type = other DNA
cgaggtgcttcgttacagagacggagaatgcggaaccatcagcttgtcgtcatcgtc

SEQ ID NO: 186 - DNA, 57 bp, synthetic construct
  misc_feature 1..57: note = Description of sequence: Primer
  source 1..57: mol_type = other DNA
cgaggtgcttcgttatgcgttcagaatttgctcaaacagtttcttgtcgtcatcgtc

SEQ ID NO: 187 - DNA, 57 bp, synthetic construct
  misc_feature 1..57: note = Description of sequence: Primer
  source 1..57: mol_type = other DNA
cgaggtgcttcgttacagtttggtgtgcagggtcagcatgtacttgtcgtcatcgtc

SEQ ID NO: 188 - DNA, 57 bp, synthetic construct
  misc_feature 1..57: note = Description of sequence: Primer
  source 1..57: mol_type = other DNA
cgaggtgcttcgttaaatcgcaatgaaaaaagaggtcagacccttgtcgtcatcgtc

SEQ ID NO: 189 - DNA, 57 bp, synthetic construct
  misc_feature 1..57: note = Description of sequence: Primer
  source 1..57: mol_type = other DNA
cgaggtgcttcgttaaaccaggtacaggtggtcagacagaaacttgtcgtcatcgtc

SEQ ID NO: 190 - DNA, 57 bp, synthetic construct
  misc_feature 1..57: note = Description of sequence: Primer
  source 1..57: mol_type = other DNA
cgaggtgcttcgttacagaccagagaagatagccagcaggtacttgtcgtcatcgtc

SEQ ID NO: 191 - DNA, 57 bp, synthetic construct
  misc_feature 1..57: note = Description of sequence: Primer
  source 1..57: mol_type = other DNA
cgaggtgcttcgttaaacaactgcggtgatggtgttcagtttcttgtcgtcatcgtc

SEQ ID NO: 192 - DNA, 57 bp, synthetic construct
  misc_feature 1..57: note = Description of sequence: Primer
  source 1..57: mol_type = other DNA
cgaggtgcttcgttacagaccgtgagcgtcgtccaccagcatcttgtcgtcatcgtc

SEQ ID NO: 193 - DNA, 57 bp, synthetic construct
  misc_feature 1..57: note = Description of sequence: Primer
  source 1..57: mol_type = other DNA
cgaggtgcttcgttatgcaacaataacagccagcatcagcatcttgtcgtcatcgtc

SEQ ID NO: 194 - DNA, 57 bp, synthetic construct
  misc_feature 1..57: note = Description of sequence: Primer
  source 1..57: mol_type = other DNA
cgaggtgcttcgttacacaaccgccagcgtacctgctaacagcttgtcgtcatcgtc

SEQ ID NO: 195 - DNA, 57 bp, synthetic construct
  misc_feature 1..57: note = Description of sequence: Primer
  source 1..57: mol_type = other DNA
cgaggtgcttcgttaaacacgaggagacagcggagccagagacttgtcgtcatcgtc

SEQ ID NO: 196 - DNA, 60 bp, synthetic construct
  misc_feature 1..60: note = Description of sequence: Primer
  source 1..60: mol_type = other DNA
cgaggtgcttcgttaaacgccgaacagtttcacacccagcagaaccttgtcgtcatcgtc

SEQ ID NO: 197 - DNA, 57 bp, synthetic construct
  misc_feature 1..57: note = Description of sequence: Primer
  source 1..57: mol_type = other DNA
cgaggtgcttcgttaaaccgtaccaaccatcgtaaacagcgtcttgtcgtcatcgtc

SEQ ID NO: 198 - DNA, 57 bp, synthetic construct
  misc_feature 1..57: note = Description of sequence: Primer
  source 1..57: mol_type = other DNA
cgaggtgcttcgttaaacattcggcacggtcatagccagcagcttgtcgtcatcgtc

SEQ ID NO: 199 - DNA, 57 bp, synthetic construct
  misc_feature 1..57: note = Description of sequence: Primer
  source 1..57: mol_type = other DNA
cgaggtgcttcgttacacattcggaactttaattgccagtaacttgtcgtcatcgtc

SEQ ID NO: 200 - DNA, 60 bp, synthetic construct
  misc_feature 1..60: note = Description of sequence: Primer
  source 1..60: mol_type = other DNA
cgaggtgcttcgttaaacttccaggtcgttgattttggtcataaacttgtcgtcatcgtc

SEQ ID NO: 201 - DNA, 57 bp, synthetic construct
  misc_feature 1..57: note = Description of sequence: Primer
  source 1..57: mol_type = other DNA
cgaggtgcttcgttacagaacagacagcagatcgttcaggaacttgtcgtcatcgtc

SEQ ID NO: 202 - DNA, 57 bp, synthetic construct
  misc_feature 1..57: note = Description of sequence: Primer
  source 1..57: mol_type = other DNA
cgaggtgcttcgttaaatgaaccatgcaataaccatcagacccttgtcgtcatcgtc

SEQ ID NO: 203 - DNA, 57 bp, synthetic construct
  misc_feature 1..57: note = Description of sequence: Primer
  source 1..57: mol_type = other DNA
cgaggtgcttcgttaaacagcaacaacataagaaaagatgaacttgtcgtcatcgtc

SEQ ID NO: 204 - DNA, 57 bp, synthetic construct
  misc_feature 1..57: note = Description of sequence: Primer
  source 1..57: mol_type = other DNA
cgaggtgcttcgttacagataggtgttgtggtggatcagagccttgtcgtcatcgtc

SEQ ID NO: 205 - DNA, 57 bp, synthetic construct
  misc_feature 1..57: note = Description of sequence: Primer
  source 1..57: mol_type = other DNA
cgaggtgcttcgttagatattagcagcccagtccagcagaatcttgtcgtcatcgtc

SEQ ID NO: 206 - DNA, 57 bp, synthetic construct
  misc_feature 1..57: note = Description of sequence: Primer
  source 1..57: mol_type = other DNA
cgaggtgcttcgttaaaccggagacagttcagagaacagactcttgtcgtcatcgtc

SEQ ID NO: 207 - DNA, 57 bp, synthetic construct
  misc_feature 1..57: note = Description of sequence: Primer
  source 1..57: mol_type = other DNA
cgaggtgcttcgttacagttcggtgtagtattccagaacagacttgtcgtcatcgtc

SEQ ID NO: 208 - DNA, 57 bp, synthetic construct
  misc_feature 1..57: note = Description of sequence: Primer
  source 1..57: mol_type = other DNA
cgaggtgcttcgttaaacttcaaacagagatttcgcaatatgcttgtcgtcatcgtc

SEQ ID NO: 209 - DNA, 57 bp, synthetic construct
  misc_feature 1..57: note = Description of sequence: Primer
  source 1..57: mol_type = other DNA
cgaggtgcttcgttaaaccggcggagcccaactcataacaaccttgtcgtcatcgtc

SEQ ID NO: 210 - DNA, 57 bp, synthetic construct
  misc_feature 1..57: note = Description of sequence: Primer
  source 1..57: mol_type = other DNA
cgaggtgcttcgttaaacggtcacaaaaatatccattgcggtcttgtcgtcatcgtc

SEQ ID NO: 211 - DNA, 57 bp, synthetic construct
  misc_feature 1..57: note = Description of sequence: Primer
  source 1..57: mol_type = other DNA
cgaggtgcttcgttaaacaaaaatgtccatagcggtaacatacttgtcgtcatcgtc

SEQ ID NO: 212 - DNA, 57 bp, synthetic construct
  misc_feature 1..57: note = Description of sequence: Primer
  source 1..57: mol_type = other DNA
cgaggtgcttcgttatgcgccaacaatccaggtcagaacgtacttgtcgtcatcgtc

SEQ ID NO: 213 - DNA, 57 bp, synthetic construct
  misc_feature 1..57: note = Description of sequence: Primer
  source 1..57: mol_type = other DNA
cgaggtgcttcgttacagaaccggaacaaaaccatacagtgccttgtcgtcatcgtc

SEQ ID NO: 214 - DNA, 60 bp, synthetic construct
  misc_feature 1..60: note = Description of sequence: Primer
  source 1..60: mol_type = other DNA
cgaggtgcttcgttacagtaacagagacggggtttccagcagtgccttgtcgtcatcgtc

SEQ ID NO: 215 - DNA, 57 bp, synthetic construct
  misc_feature 1..57: note = Description of sequence: Primer
  source 1..57: mol_type = other DNA
cgaggtgcttcgttacagcagagacggggtttccagcagtgccttgtcgtcatcgtc

SEQ ID NO: 216 - DNA, 57 bp, synthetic construct
  misc_feature 1..57: note = Description of sequence: Primer
  source 1..57: mol_type = other DNA
cgaggtgcttcgttagatccagtacagcatattgaagatcagcttgtcgtcatcgtc

SEQ ID NO: 217 - DNA, 57 bp, synthetic construct
  misc_feature 1..57: note = Description of sequence: Primer
  source 1..57: mol_type = other DNA
cgaggtgcttcgttaaaccggagaggtggtcaggtccagagacttgtcgtcatcgtc

SEQ ID NO: 218 - DNA, 57 bp, synthetic construct
  misc_feature 1..57: note = Description of sequence: Primer
  source 1..57: mol_type = other DNA
cgaggtgcttcgttacaggtagatgttagccagcggcattttcttgtcgtcatcgtc

SEQ ID NO: 219 - DNA, 57 bp, synthetic construct
  misc_feature 1..57: note = Description of sequence: Primer
  source 1..57: mol_type = other DNA
cgaggtgcttcgttaaaccaggaagtccagagagaaagagaacttgtcgtcatcgtc

SEQ ID NO: 220 - DNA, 57 bp, synthetic construct
  misc_feature 1..57: note = Description of sequence: Primer
  source 1..57: mol_type = other DNA
cgaggtgcttcgttacagcttcacggtgtacttttgcagaaacttgtcgtcatcgtc

SEQ ID NO: 221 - DNA, 57 bp, synthetic construct
  misc_feature 1..57: note = Description of sequence: Primer
  source 1..57: mol_type = other DNA
cgaggtgcttcgttagatttttgcgatcatagcgttcaggatcttgtcgtcatcgtc

SEQ ID NO: 222 - DNA, 57 bp, synthetic construct
  misc_feature 1..57: note = Description of sequence: Primer
  source 1..57: mol_type = other DNA
cgaggtgcttcgttagatgtaggtgtgcagttcagacagtttcttgtcgtcatcgtc

SEQ ID NO: 223 - DNA, 57 bp, synthetic construct
  misc_feature 1..57: note = Description of sequence: Primer
  source 1..57: mol_type = other DNA
cgaggtgcttcgttaaacgctaacagacagtaacagcagagacttgtcgtcatcgtc

SEQ ID NO: 224 - DNA, 57 bp, synthetic construct
  misc_feature 1..57: note = Description of sequence: Primer
  source 1..57: mol_type = other DNA
cgaggtgcttcgttacagggtcacggtcagttcggccatatacttgtcgtcatcgtc

SEQ ID NO: 225 - DNA, 57 bp, synthetic construct
  misc_feature 1..57: note = Description of sequence: Primer
  source 1..57: mol_type = other DNA
cgaggtgcttcgttacagttcacccggagagtcatacatatacttgtcgtcatcgtc

SEQ ID NO: 226 - DNA, 60 bp, synthetic construct
  misc_feature 1..60: note = Description of sequence: Primer
  source 1..60: mol_type = other DNA
cgaggtgcttcgttaaacaatgtaaacaatagagaacggcatcatcttgtcgtcatcgtc

SEQ ID NO: 227 - DNA, 57 bp, synthetic construct
  misc_feature 1..57: note = Description of sequence: Primer
  source 1..57: mol_type = other DNA
cgaggtgcttcgttaaatgtaaacaatagagaacggcatcatcttgtcgtcatcgtc

SEQ ID NO: 228 - DNA, 60 bp, synthetic construct
  misc_feature 1..60: note = Description of sequence: Primer
  source 1..60: mol_type = other DNA
cgaggtgcttcgttagatgtaaacaatagagaacggcatcatcagcttgtcgtcatcgtc

SEQ ID NO: 229 - DNA, 60 bp, synthetic construct
  misc_feature 1..60: note = Description of sequence: Primer
  source 1..60: mol_type = other DNA
cgaggtgcttcgttacaggtagaacaggtgagagaaactcatggtcttgtcgtcatcgtc

SEQ ID NO: 230 - DNA, 57 bp, synthetic construct
  misc_feature 1..57: note = Description of sequence: Primer
  source 1..57: mol_type = other DNA
cgaggtgcttcgttacagcaggatagaaatgcccataatgaacttgtcgtcatcgtc

SEQ ID NO: 231 - DNA, 57 bp, synthetic construct
  misc_feature 1..57: note = Description of sequence: Primer
  source 1..57: mol_type = other DNA
cgaggtgcttcgttaaaccaggaatgcacggtgaaacagaaccttgtcgtcatcgtc

SEQ ID NO: 232 - DNA, 57 bp, synthetic construct
  misc_feature 1..57: note = Description of sequence: Primer
  source 1..57: mol_type = other DNA
cgaggtgcttcgttaaaccaggttcagaacatcagaagaaaacttgtcgtcatcgtc

SEQ ID NO: 233 - DNA, 57 bp, synthetic construct
  misc_feature 1..57: note = Description of sequence: Primer
  source 1..57: mol_type = other DNA
cgaggtgcttcgttacagaaactccagatacggaaccagacgcttgtcgtcatcgtc

SEQ ID NO: 234 - DNA, 57 bp, synthetic construct
  misc_feature 1..57: note = Description of sequence: Primer
  source 1..57: mol_type = other DNA
cgaggtgcttcgttaaaccggcttgatctcacgagacagtttcttgtcgtcatcgtc

SEQ ID NO: 235 - DNA, 57 bp, synthetic construct
  misc_feature 1..57: note = Description of sequence: Primer
  source 1..57: mol_type = other DNA
cgaggtgcttcgttaaacatagtaggttaagattgccagcagcttgtcgtcatcgtc

SEQ ID NO: 236 - DNA, 57 bp, synthetic construct
  misc_feature 1..57: note = Description of sequence: Primer
  source 1..57: mol_type = other DNA
cgaggtgcttcgttaagcgttcacgttcagatccggcagaaacttgtcgtcatcgtc

SEQ ID NO: 237 - DNA, 57 bp, synthetic construct
  misc_feature 1..57: note = Description of sequence: Primer
  source 1..57: mol_type = other DNA
cgaggtgcttcgttagatcggagacaggatttcagaggtgtacttgtcgtcatcgtc

SEQ ID NO: 238 - DNA, 57 bp, synthetic construct
  misc_feature 1..57: note = Description of sequence: Primer
  source 1..57: mol_type = other DNA
cgaggtgcttcgttacagagccagatagcgattaaacaggttcttgtcgtcatcgtc

SEQ ID NO: 239 - DNA, 60 bp, synthetic construct
  misc_feature 1..60: note = Description of sequence: Primer
  source 1..60: mol_type = other DNA
cgaggtgcttcgttacagcagccaggtaactgatgcgatcagcagcttgtcgtcatcgtc

SEQ ID NO: 240 - DNA, 57 bp, synthetic construct
  misc_feature 1..57: note = Description of sequence: Primer
  source 1..57: mol_type = other DNA
cgaggtgcttcgttacagccaggtaacagatgcgatcagcagcttgtcgtcatcgtc

SEQ ID NO: 241 - DNA, 57 bp, synthetic construct
  misc_feature 1..57: note = Description of sequence: Primer
  source 1..57: mol_type = other DNA
cgaggtgcttcgttaaacgccttccataaattcgtccaggaacttgtcgtcatcgtc

SEQ ID NO: 242 - DNA, 57 bp, synthetic construct
  misc_feature 1..57: note = Description of sequence: Primer
  source 1..57: mol_type = other DNA
cgaggtgcttcgttagatatgcgggataaccggagacagagccttgtcgtcatcgtc

SEQ ID NO: 243 - DNA, 57 bp, synthetic construct
  misc_feature 1..57: note = Description of sequence: Primer
  source 1..57: mol_type = other DNA
cgaggtgcttcgttaagccagttgaaccggaggccataaatacttgtcgtcatcgtc

SEQ ID NO: 244 - DNA, 57 bp, synthetic construct
  misc_feature 1..57: note = Description of sequence: Primer
  source 1..57: mol_type = other DNA
cgaggtgcttcgttaaacaacacgtaacggctcccataaccacttgtcgtcatcgtc

SEQ ID NO: 245 - DNA, 60 bp, synthetic construct
  misc_feature 1..60: note = Description of sequence: Primer
  source 1..60: mol_type = other DNA
cgaggtgcttcgttacagcagacacggcggcataccaaacagcagcttgtcgtcatcgtc

SEQ ID NO: 246 - DNA, 57 bp, synthetic construct
  misc_feature 1..57: note = Description of sequence: Primer
  source 1..57: mol_type = other DNA
cgaggtgcttcgttacagacacggcggcataccgaacagcagcttgtcgtcatcgtc

SEQ ID NO: 247 - DNA, 57 bp, synthetic construct
  misc_feature 1..57: note = Description of sequence: Primer
  source 1..57: mol_type = other DNA
cgaggtgcttcgttacagtttcgcaatggtttcattcagacccttgtcgtcatcgtc

SEQ ID NO: 248 - DNA, 57 bp, synthetic construct
  misc_feature 1..57: note = Description of sequence: Primer
  source 1..57: mol_type = other DNA
cgaggtgcttcgttaaacaggcggcggcataccaataaccagcttgtcgtcatcgtc

SEQ ID NO: 249 - DNA, 57 bp, synthetic construct
  misc_feature 1..57: note = Description of sequence: Primer
  source 1..57: mol_type = other DNA
cgaggtgcttcgttaaacttccgggcctttttcgtccagcagcttgtcgtcatcgtc

SEQ ID NO: 250 - DNA, 57 bp, synthetic construct
  misc_feature 1..57: note = Description of sequence: Primer
  source 1..57: mol_type = other DNA
cgaggtgcttcgttagatagaagagtaatactgataaatgaacttgtcgtcatcgtc

SEQ ID NO: 251 - DNA, 57 bp, synthetic construct
  misc_feature 1..57: note = Description of sequence: Primer
  source 1..57: mol_type = other DNA
cgaggtgcttcgttaaacttcgtagttcagacccgtcagaatcttgtcgtcatcgtc

SEQ ID NO: 252 - DNA, 57 bp, synthetic construct
  misc_feature 1..57: note = Description of sequence: Primer
  source 1..57: mol_type = other DNA
cgaggtgcttcgttacagggtcgggtcagcaggattcagaatcttgtcgtcatcgtc

SEQ ID NO: 253 - DNA, 57 bp, synthetic construct
  misc_feature 1..57: note = Description of sequence: Primer
  source 1..57: mol_type = other DNA
cgaggtgcttcgttacaggaaagggaacataacaatcaggatcttgtcgtcatcgtc

SEQ ID NO: 254 - DNA, 57 bp, synthetic construct
  misc_feature 1..57: note = Description of sequence: Primer
  source 1..57: mol_type = other DNA
cgaggtgcttcgttacatcagggtcagcaggtacagcatgaacttgtcgtcatcgtc

SEQ ID NO: 255 - DNA, 57 bp, synthetic construct
  misc_feature 1..57: note = Description of sequence: Primer
  source 1..57: mol_type = other DNA
cgaggtgcttcgttaaaccataaccaggtacatgaacaggaacttgtcgtcatcgtc

SEQ ID NO: 256 - DNA, 57 bp, synthetic construct
  misc_feature 1..57: note = Description of sequence: Primer
  source 1..57: mol_type = other DNA
cgaggtgcttcgttacagcagcgggaacagaacattcaggaacttgtcgtcatcgtc

SEQ ID NO: 257 - DNA, 57 bp, synthetic construct
  misc_feature 1..57: note = Description of sequence: Primer
  source 1..57: mol_type = other DNA
cgaggtgcttcgttacagtgccaggttttccagaaagatatacttgtcgtcatcgtc

SEQ ID NO: 258 - DNA, 57 bp, synthetic construct
  misc_feature 1..57: note = Description of sequence: Primer
  source 1..57: mol_type = other DNA
cgaggtgcttcgttaggtattatagaacacagcaaccattttcttgtcgtcatcgtc

SEQ ID NO: 259 - DNA, 57 bp, synthetic construct
  misc_feature 1..57: note = Description of sequence: Primer
  source 1..57: mol_type = other DNA
cgaggtgcttcgttacagcatgtagataaacggattcagaaccttgtcgtcatcgtc

SEQ ID NO: 260 - DNA, 57 bp, synthetic construct
  misc_feature 1..57: note = Description of sequence: Primer
  source 1..57: mol_type = other DNA
cgaggtgcttcgttaaacaaacacaaccagttcgttcagatacttgtcgtcatcgtc

SEQ ID NO: 261 - DNA, 60 bp, synthetic construct
  misc_feature 1..60: note = Description of sequence: Primer
  source 1..60: mol_type = other DNA
cgaggtgcttcgttaaacaacggtcacggtgtagatttccaggaacttgtcgtcatcgtc

SEQ ID NO: 262 - DNA, 57 bp, synthetic construct
  misc_feature 1..57: note = Description of sequence: Primer
  source 1..57: mol_type = other DNA
cgaggtgcttcgttaaacggtcacggtatagatttccaggaacttgtcgtcatcgtc

SEQ ID NO: 263 - DNA, 57 bp, synthetic construct
  misc_feature 1..57: note = Description of sequence: Primer
  source 1..57: mol_type = other DNA
cgaggtgcttcgttagatgaatgcgaaaaaggtgaacaggaacttgtcgtcatcgtc

SEQ ID NO: 264 - DNA, 57 bp, synthetic construct
  misc_feature 1..57: note = Description of sequence: Primer
  source 1..57: mol_type = other DNA
cgaggtgcttcgttagatagccagcagatagcagtcaatgaacttgtcgtcatcgtc

SEQ ID NO: 265 - DNA, 57 bp, synthetic construct
  misc_feature 1..57: note = Description of sequence: Primer
  source 1..57: mol_type = other DNA
cgaggtgcttcgttaaacgtgcggagaaccttgcagcagagacttgtcgtcatcgtc

SEQ ID NO: 266 - DNA, 57 bp, synthetic construct
  misc_feature 1..57: note = Description of sequence: Primer
  source 1..57: mol_type = other DNA
cgaggtgcttcgttacagcgggaacagttgttcacccagcatcttgtcgtcatcgtc

SEQ ID NO: 267 - DNA, 57 bp, synthetic construct
  misc_feature 1..57: note = Description of sequence: Primer
  source 1..57: mol_type = other DNA
cgaggtgcttcgttaaacaaacagcagaaccaggaacaggaacttgtcgtcatcgtc

SEQ ID NO: 268 - DNA, 57 bp, synthetic construct
  misc_feature 1..57: note = Description of sequence: Primer
  source 1..57: mol_type = other DNA
cgaggtgcttcgttaaacgcccataaccagcggaaaaaccagcttgtcgtcatcgtc

SEQ ID NO: 269 - DNA, 57 bp, synthetic construct
  misc_feature 1..57: note = Description of sequence: Primer
  source 1..57: mol_type = other DNA
cgaggtgcttcgttacagcggaaaaaccagatcatgcagacgcttgtcgtcatcgtc

SEQ ID NO: 270 - DNA, 57 bp, synthetic construct
  misc_feature 1..57: note = Description of sequence: Primer
  source 1..57: mol_type = other DNA
cgaggtgcttcgttaaacagagtaaacataagaaccaacagccttgtcgtcatcgtc

SEQ ID NO: 271 - DNA, 57 bp, synthetic construct
  misc_feature 1..57: note = Description of sequence: Primer
  source 1..57: mol_type = other DNA
cgaggtgcttcgttatgccggaaagaagataatgctcagcagcttgtcgtcatcgtc

SEQ ID NO: 272 - DNA, 57 bp, synthetic construct
  misc_feature 1..57: note = Description of sequence: Primer
  source 1..57: mol_type = other DNA
cgaggtgcttcgttacatgaaatgagagaaaacggtcaggaacttgtcgtcatcgtc

SEQ ID NO: 273 - DNA, 57 bp, synthetic construct
  misc_feature 1..57: note = Description of sequence: Primer
  source 1..57: mol_type = other DNA
cgaggtgcttcgttatgcagatgagaatgcagcgaacagtaacttgtcgtcatcgtc

SEQ ID NO: 274 - DNA, 57 bp, synthetic construct
  misc_feature 1..57: note = Description of sequence: Primer
  source 1..57: mol_type = other DNA
cgaggtgcttcgttacagaccccacagagaaaccagtaattgcttgtcgtcatcgtc

SEQ ID NO: 275 - DNA, 57 bp, synthetic construct
  misc_feature 1..57: note = Description of sequence: Primer
  source 1..57: mol_type = other DNA
cgaggtgcttcgttaaacttccacaaccacacccagttgatgcttgtcgtcatcgtc

SEQ ID NO: 276 - DNA, 57 bp, synthetic construct
  misc_feature 1..57: note = Description of sequence: Primer
  source 1..57: mol_type = other DNA
cgaggtgcttcgttaaacacgttgaacggcatccagaataaacttgtcgtcatcgtc

SEQ ID NO: 277 - DNA, 57 bp, synthetic construct
  misc_feature 1..57: note = Description of sequence: Primer
  source 1..57: mol_type = other DNA
cgaggtgcttcgttacagagagttatgatattcagacagtttcttgtcgtcatcgtc

SEQ ID NO: 278 - DNA, 60 bp, synthetic construct
  misc_feature 1..60: note = Description of sequence: Primer
  source 1..60: mol_type = other DNA
cgaggtgcttcgttaaatgaatttgaagttctggtctgctaacagcttgtcgtcatcgtc

SEQ ID NO: 279 - DNA, 57 bp, synthetic construct
  misc_feature 1..57: note = Description of sequence: Primer
  source 1..57: mol_type = other DNA
cgaggtgcttcgttacaggtacggtttgaaataattcagaaccttgtcgtcatcgtc

SEQ ID NO: 280 - DNA, 57 bp, synthetic construct
  misc_feature 1..57: note = Description of sequence: Primer
  source 1..57: mol_type = other DNA
cgaggtgcttcgttaaatagaagaaattgcgccaaccagagccttgtcgtcatcgtc

SEQ ID NO: 281 - DNA, 57 bp, synthetic construct
  misc_feature 1..57: note = Description of sequence: Primer
  source 1..57: mol_type = other DNA
cgaggtgcttcgttaaacacgggtcagcaggttatacagaaacttgtcgtcatcgtc

SEQ ID NO: 282 - DNA, 57 bp, synthetic construct
  misc_feature 1..57: note = Description of sequence: Primer
  source 1..57: mol_type = other DNA
cgaggtgcttcgttaaaccggggtactgatttcaacaatgtgcttgtcgtcatcgtc

SEQ ID NO: 283 - DNA, 57 bp, synthetic construct
  misc_feature 1..57: note = Description of sequence: Primer
  source 1..57: mol_type = other DNA
cgaggtgcttcgttaaacaatttcaacaccagccagcagtttcttgtcgtcatcgtc

SEQ ID NO: 284 - DNA, 60 bp, synthetic construct
  misc_feature 1..60: note = Description of sequence: Primer
  source 1..60: mol_type = other DNA
cgaggtgcttcgttaaacggtgtggacaacctgttcgcccagaatcttgtcgtcatcgtc

SEQ ID NO: 285 - DNA, 57 bp, synthetic construct
  misc_feature 1..57: note = Description of sequence: Primer
  source 1..57: mol_type = other DNA
cgaggtgcttcgttacagaaaaaccagtgaacccgccattgccttgtcgtcatcgtc

SEQ ID NO: 286 - DNA, 57 bp, synthetic construct
  misc_feature 1..57: note = Description of sequence: Primer
  source 1..57: mol_type = other DNA
cgaggtgcttcgttaagctgcaatgatggtggtcggcatgtacttgtcgtcatcgtc

SEQ ID NO: 287 - DNA, 57 bp, synthetic construct
  misc_feature 1..57: note = Description of sequence: Primer
  source 1..57: mol_type = other DNA
cgaggtgcttcgttacataccaaaaatctgtgcaaccaggatcttgtcgtcatcgtc

SEQ ID NO: 288 - DNA, 57 bp, synthetic construct
  misc_feature 1..57: note = Description of sequence: Primer
  source 1..57: mol_type = other DNA
cgaggtgcttcgttacagacccagaacttgcgtaatcagaatcttgtcgtcatcgtc

SEQ ID NO: 289 - DNA, 60 bp, synthetic construct
  misc_feature 1..60: note = Description of sequence: Primer
  source 1..60: mol_type = other DNA
cgaggtgcttcgttacagacccaggaacagagcagccaggatacgcttgtcgtcatcgtc

SEQ ID NO: 290 - DNA, 57 bp, synthetic construct
  misc_feature 1..57: note = Description of sequence: Primer
  source 1..57: mol_type = other DNA
cgaggtgcttcgttacagcagaaccgtccaagaacccagcagcttgtcgtcatcgtc

SEQ ID NO: 291 - DNA, 60 bp, synthetic construct
  misc_feature 1..60: note = Description of sequence: Primer
  source 1..60: mol_type = other DNA
cgaggtgcttcgttaaacgccgtaaaccaggaactcaaacagtttcttgtcgtcatcgtc

SEQ ID NO: 292 - DNA, 57 bp, synthetic construct
  misc_feature 1..57: note = Description of sequence: Primer
  source 1..57: mol_type = other DNA
cgaggtgcttcgttaggtgtacggcagcgggttagccagtttcttgtcgtcatcgtc

SEQ ID NO: 293 - DNA, 57 bp, synthetic construct
  misc_feature 1..57: note = Description of sequence: Primer
  source 1..57: mol_type = other DNA
cgaggtgcttcgttacagcagaaccagttggtgagacagtttcttgtcgtcatcgtc

SEQ ID NO: 294 - DNA, 57 bp, synthetic construct
  misc_feature 1..57: note = Description of sequence: Primer
  source 1..57: mol_type = other DNA
cgaggtgcttcgttacagaccgattgcttcgtccagcaggaacttgtcgtcatcgtc

SEQ ID NO: 295 - DNA, 57 bp, synthetic construct
  misc_feature 1..57: note = Description of sequence: Primer
  source 1..57: mol_type = other DNA
cgaggtgcttcgttaggtggtagccatagaatcttgcagatacttgtcgtcatcgtc

SEQ ID NO: 296 - DNA, 60 bp, synthetic construct
  misc_feature 1..60: note = Description of sequence: Primer
  source 1..60: mol_type = other DNA
cgaggtgcttcgttacaggaaagaagagatagatgccatcaggaacttgtcgtcatcgtc

SEQ ID NO: 297 - DNA, 57 bp, synthetic construct
  misc_feature 1..57: note = Description of sequence: Primer
  source 1..57: mol_type = other DNA
cgaggtgcttcgttagaaagaagagatagatgccatcaggaacttgtcgtcatcgtc

SEQ ID NO: 298 - DNA, 57 bp, synthetic construct
  misc_feature 1..57: note = Description of sequence: Primer
  source 1..57: mol_type = other DNA
cgaggtgcttcgttacagaaaacttgaaatagatgccatcagcttgtcgtcatcgtc

SEQ ID NO: 299 - DNA, 57 bp, synthetic construct
  misc_feature 1..57: note = Description of sequence: Primer
  source 1..57: mol_type = other DNA
cgaggtgcttcgttatgccgagaaatgcagagcgaacagcagcttgtcgtcatcgtc

SEQ ID NO: 300 - DNA, 57 bp, synthetic construct
  misc_feature 1..57: note = Description of sequence: Primer
  source 1..57: mol_type = other DNA
cgaggtgcttcgttaaatacccggataatgcttaatcagacgcttgtcgtcatcgtc

SEQ ID NO: 301 - DNA, 57 bp, synthetic construct
  misc_feature 1..57: note = Description of sequence: Primer
  source 1..57: mol_type = other DNA
cgaggtgcttcgttacagaacaccagaatagctgctcataaacttgtcgtcatcgtc

SEQ ID NO: 302 - DNA, 57 bp, synthetic construct
  misc_feature 1..57: note = Description of sequence: Primer
  source 1..57: mol_type = other DNA
cgaggtgcttcgttaaaccattgccagcagcggacccatacccttgtcgtcatcgtc

SEQ ID NO: 303 - DNA, 60 bp, synthetic construct
  misc_feature 1..60: note = Description of sequence: Primer
  source 1..60: mol_type = other DNA
cgaggtgcttcgttacagaaagatggtgaagttttccagaacagacttgtcgtcatcgtc

SEQ ID NO: 304 - DNA, 60 bp, synthetic construct
  misc_feature 1..60: note = Description of sequence: Primer
  source 1..60: mol_type = other DNA
cgaggtgcttcgttaaaccagaaagatggtgaagttttccagaaccttgtcgtcatcgtc

SEQ ID NO: 305 - DNA, 57 bp, synthetic construct
  misc_feature 1..57: note = Description of sequence: Primer
  source 1..57: mol_type = other DNA
cgaggtgcttcgttacatattggtttccagggtcatcagaaacttgtcgtcatcgtc

SEQ ID NO: 306 - DNA, 60 bp, synthetic construct
  misc_feature 1..60: note = Description of sequence: Primer
  source 1..60: mol_type = other DNA
cgaggtgcttcgttaaacaacatagaaagaaactgcaaacgtaaccttgtcgtcatcgtc

SEQ ID NO: 307 - DNA, 57 bp, synthetic construct
  misc_feature 1..57: note = Description of sequence: Primer
  source 1..57: mol_type = other DNA
cgaggtgcttcgttacagcagtaaggtaacttgcagtaatgccttgtcgtcatcgtc

SEQ ID NO: 308 - DNA, 57 bp, synthetic construct
  misc_feature 1..57: note = Description of sequence: Primer
  source 1..57: mol_type = other DNA
cgaggtgcttcgttaaacagatgcagcgtgttcagaggtgtacttgtcgtcatcgtc

SEQ ID NO: 309 - DNA, 57 bp, synthetic construct
  misc_feature 1..57: note = Description of sequence: Primer
  source 1..57: mol_type = other DNA
cgaggtgcttcgttaggtttccaggaaggtttcagccagagacttgtcgtcatcgtc

SEQ ID NO: 310 - DNA, 57 bp, synthetic construct
  misc_feature 1..57: note = Description of sequence: Primer
  source 1..57: mol_type = other DNA
cgaggtgcttcgttaaacggtgttagagatagctgccatcgtcttgtcgtcatcgtc

SEQ ID NO: 311 - DNA, 57 bp, synthetic construct
  misc_feature 1..57: note = Description of sequence: Primer
  source 1..57: mol_type = other DNA
cgaggtgcttcgttacagcggaacagacggagatgccagaaacttgtcgtcatcgtc

SEQ ID NO: 312 - DNA, 57 bp, synthetic construct
  misc_feature 1..57: note = Description of sequence: Primer
  source 1..57: mol_type = other DNA
cgaggtgcttcgttaaacagacggagatgccaggaacatatacttgtcgtcatcgtc

SEQ ID NO: 313 - DNA, 57 bp, synthetic construct
  misc_feature 1..57: note = Description of sequence: Primer
  source 1..57: mol_type = other DNA
cgaggtgcttcgttacagagacacatcatgtttcagcagcatcttgtcgtcatcgtc

SEQ ID NO: 314 - DNA, 57 bp, synthetic construct
  misc_feature 1..57: note = Description of sequence: Primer
  source 1..57: mol_type = other DNA
cgaggtgcttcgttacagaacaattaacatattcagcagtaacttgtcgtcatcgtc

SEQ ID NO: 315 - DNA, 57 bp, synthetic construct
  misc_feature 1..57: note = Description of sequence: Primer
  source 1..57: mol_type = other DNA
cgaggtgcttcgttacagagcagaggtataaccgatcataaacttgtcgtcatcgtc

SEQ ID NO: 316 - DNA, 57 bp, synthetic construct
  misc_feature 1..57: note = Description of sequence: Primer
  source 1..57: mol_type = other DNA
cgaggtgcttcgttaggtgtaaccaatcataaacagcaggtacttgtcgtcatcgtc

SEQ ID NO: 317 - DNA, 57 bp, synthetic construct
  misc_feature 1..57: note = Description of sequence: Primer
  source 1..57: mol_type = other DNA
cgaggtgcttcgttaaaccggatcaatgtccagcggcagtttcttgtcgtcatcgtc

SEQ ID NO: 318 - DNA, 57 bp, synthetic construct
  misc_feature 1..57: note = Description of sequence: Primer
  source 1..57: mol_type = other DNA
cgaggtgcttcgttagatttcaaaactctggttcagttggaacttgtcgtcatcgtc

SEQ ID NO: 319 - DNA, 57 bp, synthetic construct
  misc_feature 1..57: note = Description of sequence: Primer
  source 1..57: mol_type = other DNA
cgaggtgcttcgttagatcaggtgaataaacgggataatcagcttgtcgtcatcgtc

SEQ ID NO: 320 - DNA, 57 bp, synthetic construct
  misc_feature 1..57: note = Description of sequence: Primer
  source 1..57: mol_type = other DNA
cgaggtgcttcgttaaattgagctacttgcccagaacattaacttgtcgtcatcgtc

SEQ ID NO: 321 - DNA, 57 bp, synthetic construct
  misc_feature 1..57: note = Description of sequence: Primer
  source 1..57: mol_type = other DNA
cgaggtgcttcgttagatcaggtacaggtgtgagataatcatcttgtcgtcatcgtc

SEQ ID NO: 322 - DNA, 57 bp, synthetic construct
  misc_feature 1..57: note = Description of sequence: Primer
  source 1..57: mol_type = other DNA
cgaggtgcttcgttaaacagaaacatccaggtaaatcaggaacttgtcgtcatcgtc

SEQ ID NO: 323 - DNA, 57 bp, synthetic construct
  misc_feature 1..57: note = Description of sequence: Primer
  source 1..57: mol_type = other DNA
cgaggtgcttcgttaaacagaaacattgaaaatcagcagtaacttgtcgtcatcgtc

SEQ ID NO: 324 - DNA, 57 bp, synthetic construct
  misc_feature 1..57: note = Description of sequence: Primer
  source 1..57: mol_type = other DNA
cgaggtgcttcgttaaacaaacagattcatccacagcaggctcttgtcgtcatcgtc

SEQ ID NO: 325 - DNA, 57 bp, synthetic construct
  misc_feature 1..57: note = Description of sequence: Primer
  source 1..57: mol_type = other DNA
cgaggtgcttcgttacacatgataccatttttcctgggtgaacttgtcgtcatcgtc

SEQ ID NO: 326 - DNA, 57 bp, synthetic construct
  misc_feature 1..57: note = Description of sequence: Primer
  source 1..57: mol_type = other DNA
cgaggtgcttcgttaaacagaaatgtcctgaataaacagattcttgtcgtcatcgtc

SEQ ID NO: 327 - DNA, 57 bp, synthetic construct
  misc_feature 1..57: note = Description of sequence: Primer
  source 1..57: mol_type = other DNA
cgaggtgcttcgttaggtgtttttaatcagttcgtccaggtacttgtcgtcatcgtc

SEQ ID NO: 328 - DNA, 57 bp, synthetic construct
  misc_feature 1..57: note = Description of sequence: Primer
  source 1..57: mol_type = other DNA
cgaggtgcttcgttaaacttcgttaccacgagattgcaggaacttgtcgtcatcgtc

SEQ ID NO: 329 - DNA, 57 bp, synthetic construct
  misc_feature 1..57: note = Description of sequence: Primer
  source 1..57: mol_type = other DNA
cgaggtgcttcgttaaactttttcttccatgtcggtcaggatcttgtcgtcatcgtc

SEQ ID NO: 330 - DNA, 57 bp, synthetic construct; identical to SEQ ID NO: 145
  misc_feature 1..57: note = Description of sequence: Primer
  source 1..57: mol_type = other DNA

SEQ ID NO: 331 - DNA, 57 bp, synthetic construct; identical to SEQ ID NO: 162
  misc_feature 1..57: note = Description of sequence: Primer
  source 1..57: mol_type = other DNA

SEQ ID NO: 332 - DNA, 57 bp, synthetic construct
  misc_feature 1..57: note = Description of sequence: Primer
  source 1..57: mol_type = other DNA
cgaggtgcttcgttaaacaggtttgtcaaccggcagcatacccttgtcgtcatcgtc

SEQ ID NO: 333 - DNA, 57 bp, synthetic construct
  misc_feature 1..57: note = Description of sequence: Primer
  source 1..57: mol_type = other DNA
cgaggtgcttcgttaaaccggcagcatacccagatactgaaccttgtcgtcatcgtc

SEQ ID NO: 334 - DNA, 57 bp, synthetic construct
  misc_feature 1..57: note = Description of sequence: Primer
  source 1..57: mol_type = other DNA
cgaggtgcttcgttacagttcatattccacgtgcggtaaacgcttgtcgtcatcgtc

SEQ ID NO: 335 - DNA, 57 bp, synthetic construct
  misc_feature 1..57: note = Description of sequence: Primer
  source 1..57: mol_type = other DNA
cgaggtgcttcgttaaacgtgtaacggagatgcgcccagtttcttgtcgtcatcgtc

SEQ ID NO: 336 - DNA, 57 bp, synthetic construct
  misc_feature 1..57: note = Description of sequence: Primer
  source 1..57: mol_type = other DNA
cgaggtgcttcgttacagggtgaaaacgtccacattcaggatcttgtcgtcatcgtc

SEQ ID NO: 337 - DNA, 57 bp, synthetic construct
  misc_feature 1..57: note = Description of sequence: Primer
  source 1..57: mol_type = other DNA
cgaggtgcttcgttacaggtgggtggtgaaaacgtaaacaaacttgtcgtcatcgtc

SEQ ID NO: 338 - DNA, 57 bp, synthetic construct
  misc_feature 1..57: note = Description of sequence: Primer
  source 1..57: mol_type = other DNA
cgaggtgcttcgttacagacgtgcctgggtcagcagcatgaacttgtcgtcatcgtc

SEQ ID NO: 339 - DNA, 60 bp, synthetic construct
  misc_feature 1..60: note = Description of sequence: Primer
  source 1..60: mol_type = other DNA
cgaggtgcttcgttacacaccaaccagagccaggatagacagcatcttgtcgtcatcgtc

SEQ ID NO: 340 - DNA, 57 bp, synthetic construct
  misc_feature 1..57: note = Description of sequence: Primer
  source 1..57: mol_type = other DNA
cgaggtgcttcgttaaacttcaaccggggtgtaagacagagccttgtcgtcatcgtc

SEQ ID NO: 341 - DNA, 60 bp, synthetic construct
  misc_feature 1..60: note = Description of sequence: Primer
  source 1..60: mol_type = other DNA
cgaggtgcttcgttagatcagacccaggtcaccgtccatcaggttcttgtcgtcatcgtc

SEQ ID NO: 342 - DNA, 57 bp, synthetic construct
  misc_feature 1..57: note = Description of sequence: Primer
  source 1..57: mol_type = other DNA
cgaggtgcttcgttacagacccaggtcaccgtccatcaggttcttgtcgtcatcgtc

SEQ ID NO: 343 - DNA, 57 bp, synthetic construct
  misc_feature 1..57: note = Description of sequence: Primer
  source 1..57: mol_type = other DNA
cgaggtgcttcgttacagagacggagagtgcagaaccatcagcttgtcgtcatcgtc

SEQ ID NO: 344 - DNA, 57 bp, synthetic construct
  misc_feature 1..57: note = Description of sequence: Primer
  source 1..57: mol_type = other DNA
cgaggtgcttcgttatgctttcaggatctgctcaaacagtttcttgtcgtcatcgtc

SEQ ID NO: 345 - DNA, 57 bp, synthetic construct
  misc_feature 1..57: note = Description of sequence: Primer
  source 1..57: mol_type = other DNA
cgaggtgcttcgttacagtttggtacgcagggtcagcatgtacttgtcgtcatcgtc

SEQ ID NO: 346 - DNA, 57 bp, synthetic construct
  misc_feature 1..57: note = Description of sequence: Primer
  source 1..57: mol_type = other DNA
cgaggtgcttcgttagatagcgataacaaaagaggtcagacccttgtcgtcatcgtc

SEQ ID NO: 347 - DNA, 57 bp, synthetic construct
  misc_feature 1..57: note = Description of sequence: Primer
  source 1..57: mol_type = other DNA
cgaggtgcttcgttaaaccaggtacgggtggtcagacaggaacttgtcgtcatcgtc

SEQ ID NO: 348 - DNA, 57 bp, synthetic construct
  misc_feature 1..57: note = Description of sequence: Primer
  source 1..57: mol_type = other DNA
cgaggtgcttcgttacagaccagagaagatagcgaacaggtacttgtcgtcatcgtc

SEQ ID NO: 349 - DNA, 57 bp, synthetic construct
  misc_feature 1..57: note = Description of sequence: Primer
  source 1..57: mol_type = other DNA
cgaggtgcttcgttaaacaaccggggtgatggtgttcagtttcttgtcgtcatcgtc

SEQ ID NO: 350 - DNA, 57 bp, synthetic construct
  misc_feature 1..57: note = Description of sequence: Primer
  source 1..57: mol_type = other DNA
cgaggtgcttcgttacagaccgtgagcgtcgtccaccagaaccttgtcgtcatcgtc

SEQ ID NO: 351 - DNA, 57 bp, synthetic construct
  misc_feature 1..57: note = Description of sequence: Primer
  source 1..57: mol_type = other DNA
cgaggtgcttcgttatgcaacaataacagcgaacatcagcatcttgtcgtcatcgtc

SEQ ID NO: 352 - DNA, 57 bp, synthetic construct
  misc_feature 1..57: note = Description of sequence: Primer
  source 1..57: mol_type = other DNA
cgaggtgcttcgttacactcccgccagcgtacctgctaacagcttgtcgtcatcgtc

SEQ ID NO: 353 - DNA, 57 bp, synthetic construct
  misc_feature 1..57: note = Description of sequence: Primer
  source 1..57: mol_type = other DNA
cgaggtgcttcgttatgcacgaggagacagcggagccagagacttgtcgtcatcgtc

SEQ ID NO: 354 - DNA, 60 bp, synthetic construct
  misc_feature 1..60: note = Description of sequence: Primer
  source 1..60: mol_type = other DNA
cgaggtgcttcgttaaacgccagacagtttcacacccagcagaaccttgtcgtcatcgtc

SEQ ID NO: 355 - DNA, 57 bp, synthetic construct
  misc_feature 1..57: note = Description of sequence: Primer
  source 1..57: mol_type = other DNA
cgaggtgcttcgttaaacggtgcccacaatggtaaacagggtcttgtcgtcatcgtc

SEQ ID NO: 356 - DNA, 57 bp, synthetic construct
  misc_feature 1..57: note = Description of sequence: Primer
  source 1..57: mol_type = other DNA
cgaggtgcttcgttaaacattcggaactttcatagccagcagcttgtcgtcatcgtc

SEQ ID NO: 357 - DNA, 60 bp, synthetic construct
  misc_feature 1..60: note = Description of sequence: Primer
  source 1..60: mol_type = other DNA
cgaggtgcttcgttaaacttccagaccgttgattttggtcataaacttgtcgtcatcgtc

SEQ ID NO: 358 - DNA, 57 bp, synthetic construct
  misc_feature 1..57: note = Description of sequence: Primer
  source 1..57: mol_type = other DNA
cgaggtgcttcgttacataacagacagcaggtcgttcaggaacttgtcgtcatcgtc

SEQ ID NO: 359 - DNA, 57 bp, synthetic construct
  misc_feature 1..57: note = Description of sequence: Primer
  source 1..57: mol_type = other DNA
cgaggtgcttcgttaaatgaaccatgcgatagccatcagacccttgtcgtcatcgtc

SEQ ID NO: 360 - DNA, 57 bp, synthetic construct
  misc_feature 1..57: note = Description of sequence: Primer
  source 1..57: mol_type = other DNA
cgaggtgcttcgttaaacagcaacaacataagagatgatgaacttgtcgtcatcgtc

SEQ ID NO: 361 - DNA, 57 bp, synthetic construct; identical to SEQ ID NO: 147
  misc_feature 1..57: note = Description of sequence: Primer
  source 1..57: mol_type = other DNA

SEQ ID NO: 362 - DNA, 57 bp, synthetic construct
  misc_feature 1..57: note = Description of sequence: Primer
  source 1..57: mol_type = other DNA
cgaggtgcttcgttaaacattagcagcccagtccagcagaatcttgtcgtcatcgtc

SEQ ID NO: 363 - DNA, 57 bp, synthetic construct
  misc_feature 1..57: note = Description of sequence: Primer
  source 1..57: mol_type = other DNA
cgaggtgcttcgttaaaccggagacagttcagagaacagagccttgtcgtcatcgtc

SEQ ID NO: 364 - DNA, 57 bp, synthetic construct
  misc_feature 1..57: note = Description of sequence: Primer
  source 1..57: mol_type = other DNA
cgaggtgcttcgttacagttcggtgtagtattccagcagagacttgtcgtcatcgtc

SEQ ID NO: 365 - DNA, 57 bp, synthetic construct
  misc_feature 1..57: note = Description of sequence: Primer
  source 1..57: mol_type = other DNA
cgaggtgcttcgttaaacttcaaacggagatttcgcaatgtgcttgtcgtcatcgtc

SEQ ID NO: 366 - DNA, 57 bp, synthetic construct; identical to SEQ ID NO: 152
  misc_feature 1..57: note = Description of sequence: Primer
  source 1..57: mol_type = other DNA

SEQ ID NO: 367 - DNA, 57 bp, synthetic construct
  misc_feature 1..57: note = Description of sequence: Primer
  source 1..57: mol_type = other DNA
cgaggtgcttcgttaaacggtcacaaacagatccattgcggtcttgtcgtcatcgtc

SEQ ID NO: 368 - DNA, 57 bp, synthetic construct
  misc_feature 1..57: note = Description of sequence: Primer
  source 1..57: mol_type = other DNA
cgaggtgcttcgttaaacaaacaggtccatagcggtaacatacttgtcgtcatcgtc

SEQ ID NO: 369 - DNA, 57 bp, synthetic construct
  misc_feature 1..57: note = Description of sequence: Primer
  source 1..57: mol_type = other DNA
cgaggtgcttcgttatgcgccaacaatccaggtaacaacgtacttgtcgtcatcgtc

SEQ ID NO: 370 - DNA, 57 bp, synthetic construct
  misc_feature 1..57: note = Description of sequence: Primer
  source 1..57: mol_type = other DNA
cgaggtgcttcgttacagaaccggaacagaaccatacagagccttgtcgtcatcgtc

SEQ ID NO: 371 - DNA, 60 bp, synthetic construct; identical to SEQ ID NO: 153
  misc_feature 1..60: note = Description of sequence: Primer
  source 1..60: mol_type = other DNA

SEQ ID NO: 372 - DNA, 57 bp, synthetic construct
  misc_feature 1..57: note = Description of sequence: Primer
  source 1..57: mol_type = other DNA
cgaggtgcttcgttacagcagagacagggtttccagcagagccttgtcgtcatcgtc

SEQ ID NO: 373 - DNA, 57 bp, synthetic construct
  misc_feature 1..57: note = Description of sequence: Primer
  source 1..57: mol_type = other DNA
cgaggtgcttcgttagatccagtaaaacatattgaagatcagcttgtcgtcatcgtc

SEQ ID NO: 374 - DNA, 57 bp, synthetic construct
  misc_feature 1..57: note = Description of sequence: Primer
  source 1..57: mol_type = other DNA
cgaggtgcttcgttaaaccggagaggtggtcgggtccagagacttgtcgtcatcgtc

SEQ ID NO: 375 - DNA, 57 bp, synthetic construct
  misc_feature 1..57: note = Description of sequence: Primer
  source 1..57: mol_type = other DNA
cgaggtgcttcgttacaggtagatgttagccagagacattttcttgtcgtcatcgtc

SEQ ID NO: 376 - DNA, 57 bp, synthetic construct
  misc_feature 1..57: note = Description of sequence: Primer
  source 1..57: mol_type = other DNA
cgaggtgcttcgttaaaccaggaagtccagcgggaaagagaacttgtcgtcatcgtc

SEQ ID NO: 377 - DNA, 57 bp, synthetic construct
  misc_feature 1..57: note = Description of sequence: Primer
  source 1..57: mol_type = other DNA
cgaggtgcttcgttacagcttcacggtatattcttgcagaaacttgtcgtcatcgtc

SEQ ID NO: 378 - DNA, 57 bp, synthetic construct
  misc_feature 1..57: note = Description of sequence: Primer
  source 1..57: mol_type = other DNA
cgaggtgcttcgttagattttggtaatcatagcgttcaggatcttgtcgtcatcgtc

SEQ ID NO: 379 - DNA, 57 bp, synthetic construct
  misc_feature 1..57: note = Description of sequence: Primer
  source 1..57: mol_type = other DNA
cgaggtgcttcgttagatgtaagcgtgcagttcagacagtttcttgtcgtcatcgtc

SEQ ID NO: 380 - DNA, 57 bp, synthetic construct
  misc_feature 1..57: note = Description of sequence: Primer
  source 1..57: mol_type = other DNA
cgaggtgcttcgttaaacgctaaccggcagtaacagcagagacttgtcgtcatcgtc

SEQ ID NO: 381 - DNA, 57 bp, synthetic construct
  misc_feature 1..57: note = Description of sequence: Primer
  source 1..57: mol_type = other DNA
cgaggtgcttcgttacagggtcacggtcagttttgccatatacttgtcgtcatcgtc

SEQ ID NO: 382 - DNA, 57 bp, synthetic construct
  misc_feature 1..57: note = Description of sequence: Primer
  source 1..57: mol_type = other DNA
cgaggtgcttcgttacagttcacccggagaaccatacatatacttgtcgtcatcgtc

SEQ ID NO: 383 - DNA, 60 bp, synthetic construct
  misc_feature 1..60: note = Description of sequence: Primer
  source 1..60: mol_type = other DNA
cgaggtgcttcgttaaacaatgtaaacaatagagaacggcataaccttgtcgtcatcgtc

SEQ ID NO: 384 - DNA, 57 bp, synthetic construct
  misc_feature 1..57: note = Description of sequence: Primer
  source 1..57: mol_type = other DNA
cgaggtgcttcgttagatgtaaacgatagagaacggcataaccttgtcgtcatcgtc

SEQ ID NO: 385 - DNA, 60 bp, synthetic construct
  misc_feature 1..60: note = Description of sequence: Primer
  source 1..60: mol_type = other DNA
cgaggtgcttcgttagatgtaaacaatagagaacggcataaccagcttgtcgtcatcgtc

SEQ ID NO: 386 - DNA, 60 bp, synthetic construct
  misc_feature 1..60: note = Description of sequence: Primer
  source 1..60: mol_type = other DNA
cgaggtgcttcgttacaggtagaacaggtgagaagaagacatggtcttgtcgtcatcgtc

SEQ ID NO: 387 - DNA, 57 bp, synthetic construct
  misc_feature 1..57: note = Description of sequence: Primer
  source 1..57: mol_type = other DNA
cgaggtgcttcgttacagcaggatagaaatgccggtaatgaacttgtcgtcatcgtc

SEQ ID NO: 388 - DNA, 57 bp, synthetic construct
  misc_feature 1..57: note = Description of sequence: Primer
  source 1..57: mol_type = other DNA
cgaggtgcttcgttaaaccaggaatgcacggtgcagcagaaccttgtcgtcatcgtc

SEQ ID NO: 389 - DNA, 57 bp, synthetic construct
  misc_feature 1..57: note = Description of sequence: Primer
  source 1..57: mol_type = other DNA
cgaggtgcttcgttaaaccaggttcagaacttcagaagagaacttgtcgtcatcgtc

SEQ ID NO: 390 - DNA, 57 bp, synthetic construct
  misc_feature 1..57: note = Description of sequence: Primer
  source 1..57: mol_type = other DNA
cgaggtgcttcgttacagaaactccaggtacggacccagacgcttgtcgtcatcgtc

SEQ ID NO: 391 - DNA, 57 bp, synthetic construct
  misc_feature 1..57: note = Description of sequence: Primer
  source 1..57: mol_type = other DNA
cgaggtgcttcgttaaaccggcataatttcacgagacagtttcttgtcgtcatcgtc

SEQ ID NO: 392 - DNA, 57 bp, synthetic construct
  misc_feature 1..57: note = Description of sequence: Primer
  source 1..57: mol_type = other DNA
cgaggtgcttcgttaaacatagtacggtaagattgccagcagcttgtcgtcatcgtc

SEQ ID NO: 393 - DNA, 57 bp, synthetic construct
  misc_feature 1..57: note = Description of sequence: Primer
  source 1..57: mol_type = other DNA
cgaggtgcttcgttaagcgtttgcgttcaggtccggcagaaacttgtcgtcatcgtc

SEQ ID NO: 394 - DNA, 57 bp, synthetic construct
  misc_feature 1..57: note = Description of sequence: Primer
  source 1..57: mol_type = other DNA
cgaggtgcttcgttagatcggagaagagatttcagaggtgtacttgtcgtcatcgtc

SEQ ID NO: 395 - DNA, 57 bp, synthetic construct
  misc_feature 1..57: note = Description of sequence: Primer
  source 1..57: mol_type = other DNA
cgaggtgcttcgttacagagccggatagcgattgaacaggttcttgtcgtcatcgtc

SEQ ID NO: 396 - DNA, 60 bp, synthetic construct
  misc_feature 1..60: note = Description of sequence: Primer
  source 1..60: mol_type = other DNA
cgaggtgcttcgttacagcagccaggtaactgatgcgatcaggaacttgtcgtcatcgtc

SEQ ID NO: 397 - DNA, 57 bp, synthetic construct
  misc_feature 1..57: note = Description of sequence: Primer
  source 1..57: mol_type = other DNA
cgaggtgcttcgttacagccaggtaacagatgcgatcaggaacttgtcgtcatcgtc

SEQ ID NO: 398 - DNA, 57 bp, synthetic construct
  misc_feature 1..57: note = Description of sequence: Primer
  source 1..57: mol_type = other DNA
cgaggtgcttcgttaaacagcttccataaattcgtccaggaacttgtcgtcatcgtc

SEQ ID NO: 399 - DNA, 57 bp, synthetic construct; identical to SEQ ID NO: 154
  misc_feature 1..57: note = Description of sequence: Primer
  source 1..57: mol_type = other DNA

SEQ ID NO: 400 - DNA, 57 bp, synthetic construct
  misc_feature 1..57: note = Description of sequence: Primer
  source 1..57: mol_type = other DNA
cgaggtgcttcgttaagccagttgaacggcaggccataaatacttgtcgtcatcgtc

SEQ ID NO: 401 - DNA, 57 bp, synthetic construct
  misc_feature 1..57: note = Description of sequence: Primer
  source 1..57: mol_type = other DNA
cgaggtgcttcgttaaacaacacgtaacggttcccataaacgcttgtcgtcatcgtc

SEQ ID NO: 402 - DNA, 60 bp, synthetic construct
  misc_feature 1..60: note = Description of sequence: Primer
  source 1..60: mol_type = other DNA
cgaggtgcttcgttacagcaggcacggggtcataccgaacagcagcttgtcgtcatcgtc

SEQ ID NO: 403 - DNA, 57 bp, synthetic construct; identical to SEQ ID NO: 158
  misc_feature 1..57: note = Description of sequence: Primer
  source 1..57: mol_type = other DNA

SEQ ID NO: 404 - DNA, 57 bp, synthetic construct
  misc_feature 1..57: note = Description of sequence: Primer
  source 1..57: mol_type = other DNA
cgaggtgcttcgttacagtttcgcaatggtttcgtccagacccttgtcgtcatcgtc

SEQ ID NO: 405 - DNA, 57 bp, synthetic construct
  misc_feature 1..57: note = Description of sequence: Primer
  source 1..57: mol_type = other DNA
cgaggtgcttcgttaaacaggcggcggcataccaataacacgcttgtcgtcatcgtc

SEQ ID NO: 406 - DNA, 57 bp, synthetic construct
  misc_feature 1..57: note = Description of sequence: Primer
  source 1..57: mol_type = other DNA
cgaggtgcttcgttaaacttccggttctttttcgtccagcagcttgtcgtcatcgtc

SEQ ID NO: 407 - DNA, 57 bp, synthetic construct
  misc_feature 1..57: note = Description of sequence: Primer
  source 1..57: mol_type = other DNA
cgaggtgcttcgttagatagaagagtaatactggtcaatgaacttgtcgtcatcgtc

SEQ ID NO: 408 - DNA, 57 bp, synthetic construct
  misc_feature 1..57: note = Description of sequence: Primer
  source 1..57: mol_type = other DNA
cgaggtgcttcgttatgcttcgtagttcagacccgtcagaatcttgtcgtcatcgtc

SEQ ID NO: 409 - DNA, 57 bp, synthetic construct
  misc_feature 1..57: note = Description of sequence: Primer
  source 1..57: mol_type = other DNA
cgaggtgcttcgttacagggtcgggtcagcagggtccagaatcttgtcgtcatcgtc

SEQ ID NO: 410 - DNA, 57 bp, synthetic construct
  misc_feature 1..57: note = Description of sequence: Primer
  source 1..57: mol_type = other DNA
cgaggtgcttcgttacaggaacggaaccataacaatcaggatcttgtcgtcatcgtc

SEQ ID NO: 411 - DNA, 57 bp, synthetic construct
  misc_feature 1..57: note = Description of sequence: Primer
  source 1..57: mol_type = other DNA
cgaggtgcttcgttacatcagggtaaccaggtacagcatgaacttgtcgtcatcgtc

SEQ ID NO: 412 - DNA, 57 bp, synthetic construct
  misc_feature 1..57: note = Description of sequence: Primer
  source 1..57: mol_type = other DNA
cgaggtgcttcgttaaacggtaaccaggtacatgaacaggaacttgtcgtcatcgtc

SEQ ID NO: 413 - DNA, 57 bp, synthetic construct
  misc_feature 1..57: note = Description of sequence: Primer
  source 1..57: mol_type = other DNA
cgaggtgcttcgttacagcagcgggaaaaacacgttcaggaacttgtcgtcatcgtc

SEQ ID NO: 414 - DNA, 57 bp, synthetic construct
  misc_feature 1..57: note = Description of sequence: Primer
  source 1..57: mol_type = other DNA
cgaggtgcttcgttacagtgccaggttacccagaaaaatatacttgtcgtcatcgtc

SEQ ID NO: 415 - DNA, 57 bp, synthetic construct
  misc_feature 1..57: note = Description of sequence: Primer
  source 1..57: mol_type = other DNA
cgaggtgcttcgttaggtggtatagaacacagcaaccattttcttgtcgtcatcgtc

SEQ ID NO: 416 - DNA, 57 bp, synthetic construct
  misc_feature 1..57: note = Description of sequence: Primer
  source 1..57: mol_type = other DNA
cgaggtgcttcgttacagggtgtagataaacggattcagaaccttgtcgtcatcgtc

SEQ ID NO: 417 - DNA, 57 bp, synthetic construct
  misc_feature 1..57: note = Description of sequence: Primer
  source 1..57: mol_type = other DNA
cgaggtgcttcgttaaacaaacacaaccagttcgttcacatacttgtcgtcatcgtc

SEQ ID NO: 418 - DNA, 60 bp, synthetic construct
  misc_feature 1..60: note = Description of sequence: Primer
  source 1..60: mol_type = other DNA
cgaggtgcttcgttaaacaacggtcacggtgtagatacccaggaacttgtcgtcatcgtc

SEQ ID NO: 419 - DNA, 57 bp, synthetic construct
  misc_feature 1..57: note = Description of sequence: Primer
  source 1..57: mol_type = other DNA
cgaggtgcttcgttaaacggtaacggtgtagatacccaggaacttgtcgtcatcgtc

SEQ ID NO: 420 - DNA, 57 bp, synthetic construct
  misc_feature 1..57: note = Description of sequence: Primer
  source 1..57: mol_type = other DNA
cgaggtgcttcgttagatagatgcgaaaaaggtgaacaggaacttgtcgtcatcgtc

SEQ ID NO: 421 - DNA, 57 bp, synthetic construct
  misc_feature 1..57: note = Description of sequence: Primer
  source 1..57: mol_type = other DNA
cgaggtgcttcgttagatagccagcagatagcagtcaatagacttgtcgtcatcgtc

SEQ ID NO: 422 - DNA, 57 bp, synthetic construct
  misc_feature 1..57: note = Description of sequence: Primer
  source 1..57: mol_type = other DNA
cgaggtgcttcgttacaggtgcggagaaccttgcagcagagacttgtcgtcatcgtc

SEQ ID NO: 423 - DNA, 57 bp, synthetic construct; identical to SEQ ID NO: 163
  misc_feature 1..57: note = Description of sequence: Primer
  source 1..57: mol_type = other DNA

SEQ ID NO: 424 - DNA, 57 bp, synthetic construct
  misc_feature 1..57: note = Description of sequence: Primer
  source 1..57: mol_type = other DNA
cgaggtgcttcgttaaacaaacagcagaacagagaacaggaacttgtcgtcatcgtc

SEQ ID NO: 425 - DNA, 57 bp, synthetic construct
  misc_feature 1..57: note = Description of sequence: Primer
  source 1..57: mol_type = other DNA
cgaggtgcttcgttaaacgcccataaccagcggcagaaccagcttgtcgtcatcgtc

SEQ ID NO: 426 - DNA, 57 bp, synthetic construct
  misc_feature 1..57: note = Description of sequence: Primer
  source 1..57: mol_type = other DNA
cgaggtgcttcgttacagcggcagaaccagatcatgcagacgcttgtcgtcatcgtc

SEQ ID NO: 427 - DNA, 57 bp, synthetic construct; identical to SEQ ID NO: 160
  misc_feature 1..57: note = Description of sequence: Primer
  source 1..57: mol_type = other DNA

SEQ ID NO: 428 - DNA, 57 bp, synthetic construct
  misc_feature 1..57: note = Description of sequence: Primer
  source 1..57: mol_type = other DNA
cgaggtgcttcgttatgccggaaaagagataatgctcagcagcttgtcgtcatcgtc

SEQ ID NO: 429 - DNA, 57 bp, synthetic construct
  misc_feature 1..57: note = Description of sequence: Primer
  source 1..57: mol_type = other DNA
cgaggtgcttcgttacatgaacggagagaaaacggtcaggaacttgtcgtcatcgtc

SEQ ID NO: 430 - DNA, 57 bp, synthetic construct
  misc_feature 1..57: note = Description of sequence: Primer
  source 1..57: mol_type = other DNA
cgaggtgcttcgttatgcagaagagaatgcagcgaacagaaccttgtcgtcatcgtc

SEQ ID NO: 431 - DNA, 57 bp, synthetic construct
  misc_feature 1..57: note = Description of sequence: Primer
  source 1..57: mol_type = other DNA
cgaggtgcttcgttacagaccccacagagaaaccagtaacagcttgtcgtcatcgtc

SEQ ID NO: 432 - DNA, 57 bp, synthetic construct
  misc_feature 1..57: note = Description of sequence: Primer
  source 1..57: mol_type = other DNA
cgaggtgcttcgttaaacttcaacaacaccacccagttgatgcttgtcgtcatcgtc

SEQ ID NO: 433 - DNA, 57 bp, synthetic construct
  misc_feature 1..57: note = Description of sequence: Primer
  source 1..57: mol_type = other DNA
cgaggtgcttcgttaaacacgttgaactgcatccaggatagacttgtcgtcatcgtc

SEQ ID NO: 434 - DNA, 57 bp, synthetic construct
  misc_feature 1..57: note = Description of sequence: Primer
  source 1..57: mol_type = other DNA
cgaggtgcttcgttacagagagttgcgatattcagacagtttcttgtcgtcatcgtc

SEQ ID NO: 435 - DNA, 60 bp, synthetic construct
  misc_feature 1..60: note = Description of sequence: Primer
  source 1..60: mol_type = other DNA
cgaggtgcttcgttaaatgaatttcaggttctggtctgctaacagcttgtcgtcatcgtc

SEQ ID NO: 436 - DNA, 57 bp, synthetic construct
  misc_feature 1..57: note = Description of sequence: Primer
  source 1..57: mol_type = other DNA
cgaggtgcttcgttacaggtacggctcaaaataattcagaaccttgtcgtcatcgtc

SEQ ID NO: 437 - DNA, 57 bp, synthetic construct
  misc_feature 1..57: note = Description of sequence: Primer
  source 1..57: mol_type = other DNA
cgaggtgcttcgttaaatagacggaattgcgccaaccagagccttgtcgtcatcgtc

SEQ ID NO: 438 - DNA, 57 bp, synthetic construct; identical to SEQ ID NO: 161
  misc_feature 1..57: note = Description of sequence: Primer
  source 1..57: mol_type = other DNA

SEQ ID NO: 439 - DNA, 57 bp, synthetic construct
  misc_feature 1..57: note = Description of sequence: Primer
  source 1..57: mol_type = other DNA
cgaggtgcttcgttaaaccggggtagagatttcaaccatgtgcttgtcgtcatcgtc

SEQ ID NO: 440 - DNA, 57 bp, synthetic construct
  misc_feature 1..57: note = Description of sequence: Primer
  source 1..57: mol_type = other DNA
cgaggtgcttcgttaaacaatttcgtcaccagccagcagtttcttgtcgtcatcgtc

SEQ ID NO: 441 - DNA, 60 bp, synthetic construct
  misc_feature 1..60: note = Description of sequence: Primer
  source 1..60: mol_type = other DNA
cgaggtgcttcgttaaacggtgtgaacaacctgaccacctaaaatcttgtcgtcatcgtc

SEQ ID NO: 442 - DNA, 57 bp, synthetic construct
  misc_feature 1..57: note = Description of sequence: Primer
  source 1..57: mol_type = other DNA
cgaggtgcttcgttacagaaaaacagggctacccgccattgccttgtcgtcatcgtc

SEQ ID NO: 443 - DNA, 57 bp, synthetic construct
  misc_feature 1..57: note = Description of sequence: Primer
  source 1..57: mol_type = other DNA
cgaggtgcttcgttaagctgcaatgatggtggtgctcatgtacttgtcgtcatcgtc

SEQ ID NO: 444 - DNA, 57 bp, synthetic construct
  misc_feature 1..57: note = Description of sequence: Primer
  source 1..57: mol_type = other DNA
cgaggtgcttcgttacagaccaaaaatctgagcaaccaggatcttgtcgtcatcgtc

SEQ ID NO: 445 - DNA, 57 bp, synthetic construct
  misc_feature 1..57: note = Description of sequence: Primer
  source 1..57: mol_type = other DNA
cgaggtgcttcgttacagacccagaacctgtgcaatcagaatcttgtcgtcatcgtc

SEQ ID NO: 446 - DNA, 60 bp, synthetic construct
  misc_feature 1..60: note = Description of sequence: Primer
  source 1..60: mol_type = other DNA
cgaggtgcttcgttacagacccaggaacagagcagcccagatacgcttgtcgtcatcgtc

SEQ ID NO: 447 - DNA, 57 bp, synthetic construct
  misc_feature 1..57: note = Description of sequence: Primer
  source 1..57: mol_type = other DNA
cgaggtgcttcgttacagcagaaccgtccaaccacccagcagcttgtcgtcatcgtc

SEQ ID NO: 448 - DNA, 60 bp, synthetic construct
  misc_feature 1..60: note = Description of sequence: Primer
  source 1..60: mol_type = other DNA
cgaggtgcttcgttaaacgccatgaaccaggaactcaaacagtttcttgtcgtcatcgtc

SEQ ID NO: 449 - DNA, 57 bp, synthetic construct
  misc_feature 1..57: note = Description of sequence: Primer
  source 1..57: mol_type = other DNA
cgaggtgcttcgttaggtgtacggcagcggtttagccagtttcttgtcgtcatcgtc

SEQ ID NO: 450 - DNA, 57 bp, synthetic construct; identical to SEQ ID NO: 159
  misc_feature 1..57: note = Description of sequence: Primer
  source 1..57: mol_type = other DNA

SEQ ID NO: 451 - DNA, 57 bp, synthetic construct
  misc_feature 1..57: note = Description of sequence: Primer
  source 1..57: mol_type = other DNA
cgaggtgcttcgttacagaccgtttgcttcgtccagcaggaacttgtcgtcatcgtc

SEQ ID NO: 452 - DNA, 57 bp, synthetic construct
  misc_feature 1..57: note = Description of sequence: Primer
  source 1..57: mol_type = other DNA
cgaggtgcttcgttaggtggtagccagagagtcttgcagatacttgtcgtcatcgtc

SEQ ID NO: 453 - DNA, 60 bp, synthetic construct
  misc_feature 1..60: note = Description of sequence: Primer
  source 1..60: mol_type = other DNA
cgaggtgcttcgttacagagaagaagagatagatgccatcaggaacttgtcgtcatcgtc

SEQ ID NO: 454 - DNA, 57 bp, synthetic construct
  misc_feature 1..57: note = Description of sequence: Primer
  source 1..57: mol_type = other DNA
cgaggtgcttcgttaagaagaagagatagatgccatcaggaacttgtcgtcatcgtc

SEQ ID NO: 455 - DNA, 57 bp, synthetic construct
  misc_feature 1..57: note = Description of sequence: Primer
  source 1..57: mol_type = other DNA
cgaggtgcttcgttacaggctgcttgaaatagatgccatcagcttgtcgtcatcgtc

SEQ ID NO: 456 - DNA, 57 bp, synthetic construct
  misc_feature 1..57: note = Description of sequence: Primer
  source 1..57: mol_type = other DNA
cgaggtgcttcgttatgccgagaagtacagagcgaacagcagcttgtcgtcatcgtc

SEQ ID NO: 457 - DNA, 57 bp, synthetic construct
  misc_feature 1..57: note = Description of sequence: Primer
  source 1..57: mol_type = other DNA
cgaggtgcttcgttaaatacccggatagtgtttcatcagacgcttgtcgtcatcgtc

SEQ ID NO: 458 - DNA, 57 bp, synthetic construct
  misc_feature 1..57: note = Description of sequence: Primer
  source 1..57: mol_type = other DNA
cgaggtgcttcgttacagaacaccagaatatgctgacatgaacttgtcgtcatcgtc

SEQ ID NO: 459 - DNA, 57 bp, synthetic construct
  misc_feature 1..57: note = Description of sequence: Primer
  source 1..57: mol_type = other DNA
cgaggtgcttcgttaaacggttgccagcagcggacccatacccttgtcgtcatcgtc

SEQ ID NO: 460 - DNA, 60 bp, synthetic construct; identical to SEQ ID NO: 149
  misc_feature 1..60: note = Description of sequence: Primer
  source 1..60: mol_type = other DNA

SEQ ID NO: 461 - DNA, 60 bp, synthetic construct; identical to SEQ ID NO: 148
  misc_feature 1..60: note = Description of sequence: Primer
  source 1..60: mol_type = other DNA

SEQ ID NO: 462 - DNA, 57 bp, synthetic construct
  misc_feature 1..57: note = Description of sequence: Primer
  source 1..57: mol_type = other DNA
cgaggtgcttcgttacattttggtttccagggtcatcaggaacttgtcgtcatcgtc

SEQ ID NO: 463 - DNA, 60 bp, synthetic construct
  misc_feature 1..60: note = Description of sequence: Primer
  source 1..60: mol_type = other DNA
cgaggtgcttcgttaaaccaggtagaaagaaactgcaaacgtaaccttgtcgtcatcgtc

SEQ ID NO: 464 - DNA, 57 bp, synthetic construct
  misc_feature 1..57: note = Description of sequence: Primer
  source 1..57: mol_type = other DNA
cgaggtgcttcgttacagcagtaaggtaacctgagacagagccttgtcgtcatcgtc

SEQ ID NO: 465 - DNA, 57 bp, synthetic construct
  misc_feature 1..57: note = Description of sequence: Primer
  source 1..57: mol_type = other DNA
cgaggtgcttcgttaaacagatgcagcgtgttccggggtgtacttgtcgtcatcgtc

SEQ ID NO: 466 - DNA, 57 bp, synthetic construct
  misc_feature 1..57: note = Description of sequence: Primer
  source 1..57: mol_type = other DNA
cgaggtgcttcgttaggtttcccagaaggtttcagccagagacttgtcgtcatcgtc

SEQ ID NO: 467 - DNA, 57 bp, synthetic construct
  misc_feature 1..57: note = Description of sequence: Primer
  source 1..57: mol_type = other DNA
cgaggtgcttcgttaaacggtgttagagatagcagccatacgcttgtcgtcatcgtc

SEQ ID NO: 468 - DNA, 57 bp, synthetic construct
  misc_feature 1..57: note = Description of sequence: Primer
  source 1..57: mol_type = other DNA
cgaggtgcttcgttacagcggaacagacggagaagccagaaccttgtcgtcatcgtc

SEQ ID NO: 469 - DNA, 57 bp, synthetic construct
  misc_feature 1..57: note = Description of sequence: Primer
  source 1..57: mol_type = other DNA
cgaggtgcttcgttaaacagacggagatgccagaaccatgtacttgtcgtcatcgtc

SEQ ID NO: 470 - DNA, 57 bp, synthetic construct
  misc_feature 1..57: note = Description of sequence: Primer
  source 1..57: mol_type = other DNA
cgaggtgcttcgttacagagacacgtcctgtttcagcagcatcttgtcgtcatcgtc

SEQ ID NO: 471 - DNA, 57 bp, synthetic construct
  misc_feature 1..57: note = Description of sequence: Primer
  source 1..57: mol_type = other DNA
cgaggtgcttcgttacagtgcaattaacatattcagcagtaacttgtcgtcatcgtc

SEQ ID NO: 472 - DNA, 57 bp, synthetic construct
  misc_feature 1..57: note = Description of sequence: Primer
  source 1..57: mol_type = other DNA
cgaggtgcttcgttacagagcagatgcgtaaccgatcataaacttgtcgtcatcgtc

SEQ ID NO: 473 - DNA, 57 bp, synthetic construct
  misc_feature 1..57: note = Description of sequence: Primer
  source 1..57: mol_type = other DNA
cgaggtgcttcgttatgcgtaaccaatcataaacagcaggtacttgtcgtcatcgtc

SEQ ID NO: 474 - DNA, 57 bp, synthetic construct
  misc_feature 1..57: note = Description of sequence: Primer
  source 1..57: mol_type = other DNA
cgaggtgcttcgttaaaccgggttgatgtccagcggcagtttcttgtcgtcatcgtc

SEQ ID NO: 475 - DNA, 57 bp, synthetic construct
  misc_feature 1..57: note = Description of sequence: Primer
  source 1..57: mol_type = other DNA
cgaggtgcttcgttagatttcaaatgactggttcagttgtgacttgtcgtcatcgtc

SEQ ID NO: 476 - DNA, 57 bp, synthetic construct; identical to SEQ ID NO: 157
  misc_feature 1..57: note = Description of sequence: Primer
  source 1..57: mol_type = other DNA

SEQ ID NO: 477 - DNA, 57 bp, synthetic construct
  misc_feature 1..57: note = Description of sequence: Primer
  source 1..57: mol_type = other DNA
cgaggtgcttcgttagattgagctacttgcccacagcattaacttgtcgtcatcgtc

SEQ ID NO: 478 - DNA, 57 bp, synthetic construct
  misc_feature 1..57: note = Description of sequence: Primer
  source 1..57: mol_type = other DNA
cgaggtgcttcgttagatcagagacaggtgtgagataatcatcttgtcgtcatcgtc

SEQ ID NO: 479 - DNA, 57 bp, synthetic construct; identical to SEQ ID NO: 144
  misc_feature 1..57: note = Description of sequence: Primer
  source 1..57: mol_type = other DNA

SEQ ID NO: 480 - DNA, 57 bp, synthetic construct
  misc_feature 1..57: note = Description of sequence: Primer
  source 1..57: mol_type = other DNA
cgaggtgcttcgttaaacagaaacattgaaggtcagcagtaacttgtcgtcatcgtc

SEQ ID NO: 481 - DNA, 57 bp, synthetic construct
  misc_feature 1..57: note = Description of sequence: Primer
  source 1..57: mol_type = other DNA
cgaggtgcttcgttaaacaaacgggttcatccacagcaggctcttgtcgtcatcgtc

SEQ ID NO: 482 - DNA, 57 bp, synthetic construct
  misc_feature 1..57: note = Description of sequence: Primer
  source 1..57: mol_type = other DNA
cgaggtgcttcgttaaacgtgataccattcttcctgggtgaacttgtcgtcatcgtc

SEQ ID NO: 483 - DNA, 57 bp, synthetic construct
  misc_feature 1..57: note = Description of sequence: Primer
  source 1..57: mol_type = other DNA
cgaggtgcttcgttaaacagaaatgtcctgtgaaaacagattcttgtcgtcatcgtc

SEQ ID NO: 484 - DNA, 61 bp, synthetic construct
  misc_feature 1..61: note = Description of sequence: Primer
  variation 24..29: note = n is a, c, g, or t
  variation 61: note = n is a, c, g, or t
  source 1..61: mol_type = other DNA
aagcagtggtatcaacgcagagtnnnnnnttttttttttttttttttttttttttttttvn

SEQ ID NO: 485 - DNA, 32 bp, synthetic construct
  misc_feature 1..32: note = Description of sequence: Primer
  source 1..32: mol_type = other DNA
aagcagtggtatcaacgcagagtcgacrgrgg

SEQ ID NO: 486 - DNA, 23 bp, synthetic construct
  misc_feature 1..23: note = Description of sequence: Primer
  source 1..23: mol_type = other DNA
aagcagtggtatcaacgcagagt

SEQ ID NO: 487 - DNA, 47 bp, synthetic construct
  misc_feature 1..47: note = Description of sequence: Primer
  variation 25..32: note = n is a, c, g, or t
  source 1..47: mol_type = other DNA
caagcagaagacggcatacgagatnnnnnnnngtctcgtgggctcgg

SEQ ID NO: 488 - DNA, 86 bp, synthetic construct
  misc_feature 1..86: note = Description of sequence: Primer
  variation 59: note = n is a, c, g, or t
  variation 61: note = n is a, c, g, or t
  variation 63: note = n is a, c, g, or t
  source 1..86: mol_type = other DNA
aatgatacggcgaccaccgagatctacactctttccctacacgacgctcttccgatctnhnhnaagcagtggtatcaacgcagagt

SEQ ID NO: 489-500 - skipped (12 entries)

SEQ ID NO: 501 - DNA, 90 bp, synthetic construct
  misc_feature 1..90: note = Description of sequence: Primer
  source 1..90: mol_type = other DNA
atggacgacgacgacaagcgtcagttcggtccggactggatcgttgcttaacgaagcacctcgctaaaaaaaaaaaaaaaaaaaaaaaaa

SEQ ID NO: 502 - DNA, 90 bp, synthetic construct
  misc_feature 1..90: note = Description of sequence: Primer
  source 1..90: mol_type = other DNA
atggacgacgacgacaagatggtttggggtccggacccgctgtacgtttaacgaagcacctcgctaaaaaaaaaaaaaaaaaaaaaaaaa

SEQ ID NO: 503 - DNA, 87 bp, synthetic construct
  misc_feature 1..87: note = Description of sequence: Primer
  source 1..87: mol_type = other DNA
atggacgacgacgacaagaacctggctcaggacctggctaccgtttaacgaagcacctcgctaaaaaaaaaaaaaaaaaaaaaaaaa

SEQ ID NO: 504 - DNA, 87 bp, synthetic construct
  misc_feature 1..87: note = Description of sequence: Primer
  source 1..87: mol_type = other DNA
atggacgacgacgacaagcagctggctcgtcagcaggttcacgtttaacgaagcacctcgctaaaaaaaaaaaaaaaaaaaaaaaaa

SEQ ID NO: 505 - DNA, 87 bp, synthetic construct
  misc_feature 1..87: note = Description of sequence: Primer
  source 1..87: mol_type = other DNA
atggacgacgacgacaagttcctgcaggacgttatgaacatcctgtaacgaagcacctcgctaaaaaaaaaaaaaaaaaaaaaaaaa

SEQ ID NO: 506 - DNA, 87 bp, synthetic construct
  misc_feature 1..87: note = Description of sequence: Primer
  source 1..87: mol_type = other DNA
atggacgacgacgacaagctgctgcaggaatacaactgggaactgtaacgaagcacctcgctaaaaaaaaaaaaaaaaaaaaaaaaa

SEQ ID NO: 507 - DNA, 90 bp, synthetic construct
  misc_feature 1..90: note = Description of sequence: Primer
  source 1..90: mol_type = other DNA
atggacgacgacgacaagcgtatgatggaatacggtaccaccatggtttaacgaagcacctcgctaaaaaaaaaaaaaaaaaaaaaaaaa

SEQ ID NO: 508 - DNA, 90 bp, synthetic construct
  misc_feature 1..90: note = Description of sequence: Primer
  source 1..90: mol_type = other DNA
atggacgacgacgacaaggttatgaacatcctgctgcagtacgttgtttaacgaagcacctcgctaaaaaaaaaaaaaaaaaaaaaaaaa

SEQ ID NO: 509 - DNA, 87 bp, synthetic construct
  misc_feature 1..87: note = Description of sequence: Primer
  source 1..87: mol_type = other DNA
atggacgacgacgacaaggttatgaacatcctgctgcagtacgtttaacgaagcacctcgctaaaaaaaaaaaaaaaaaaaaaaaaa

SEQ ID NO: 510 - DNA, 87 bp, synthetic construct
  misc_feature 1..87: note = Description of sequence: Primer
  source 1..87: mol_type = other DNA
atggacgacgacgacaaggaactggctgaatacctgtacaacatctaacgaagcacctcgctaaaaaaaaaaaaaaaaaaaaaaaaa

SEQ ID NO: 511 - DNA, 87 bp, synthetic construct
  misc_feature 1..87: note = Description of sequence: Primer
  source 1..87: mol_type = other DNA
atggacgacgacgacaagatcctgatgcactgccagaccaccctgtaacgaagcacctcgctaaaaaaaaaaaaaaaaaaaaaaaaa

SEQ ID NO: 512 - DNA, 87 bp, synthetic construct
  misc_feature 1..87: note = Description of sequence: Primer
  source 1..87: mol_type = other DNA
atggacgacgacgacaagatgctgtaccagcacctgctgccgctgtaacgaagcacctcgctaaaaaaaaaaaaaaaaaaaaaaaaa

SEQ ID NO: 513 - DNA, 90 bp, synthetic construct
  misc_feature 1..90: note = Description of sequence: Primer
  source 1..90: mol_type = other DNA
atggacgacgacgacaagggtatcgttgaacagtgctgcacctctatctaacgaagcacctcgctaaaaaaaaaaaaaaaaaaaaaaaaa

SEQ ID NO: 514 - DNA, 90 bp, synthetic construct
  misc_feature 1..90: note = Description of sequence: Primer
  source 1..90: mol_type = other DNA
atggacgacgacgacaaggctctgtggatgcgtctgctgccgctgctgtaacgaagcacctcgctaaaaaaaaaaaaaaaaaaaaaaaaa

SEQ ID NO: 515 - DNA, 90 bp, synthetic construct
  misc_feature 1..90: note = Description of sequence: Primer
  source 1..90: mol_type = other DNA
atggacgacgacgacaagctggctctgtggggtccggacccggctgcttaacgaagcacctcgctaaaaaaaaaaaaaaaaaaaaaaaaa

SEQ ID NO: 516 - DNA, 93 bp, synthetic construct
  misc_feature 1..93: note = Description of sequence: Primer
  source 1..93: mol_type = other DNA
atggacgacgacgacaagcgtctgctgccgctgctggctctgctggctctgtaacgaagcacctcgctaaaaaaaaaaaaaaaaaaaaaaaaa

SEQ ID NO: 517 - DNA, 87 bp, synthetic construct
  misc_feature 1..87: note = Description of sequence: Primer
  source 1..87: mol_type = other DNA
atggacgacgacgacaaggctctgtggatgcgtctgctgccgctgtaacgaagcacctcgctaaaaaaaaaaaaaaaaaaaaaaaaa

SEQ ID NO: 518 - DNA, 87 bp, synthetic construct
  misc_feature 1..87: note = Description of sequence: Primer
  source 1..87: mol_type = other DNA
atggacgacgacgacaagcacctggttgaagctctgtacctggtttaacgaagcacctcgctaaaaaaaaaaaaaaaaaaaaaaaaa

SEQ ID NO: 519 - DNA, 90 bp, synthetic construct
  misc_feature 1..90: note = Description of sequence: Primer
  source 1..90: mol_type = other DNA
atggacgacgacgacaagtctctgcagaaacgtggtatcgttgaacagtaacgaagcacctcgctaaaaaaaaaaaaaaaaaaaaaaaaa

SEQ ID NO: 520 - DNA, 87 bp, synthetic construct
  misc_feature 1..87: note = Description of sequence: Primer
  source 1..87: mol_type = other DNA
atggacgacgacgacaagtctctgcagccgctggctctggaaggttaacgaagcacctcgctaaaaaaaaaaaaaaaaaaaaaaaaa

SEQ ID NO: 521 - DNA, 87 bp, synthetic construct
  misc_feature 1..87: note = Description of sequence: Primer
  source 1..87: mol_type = other DNA
atggacgacgacgacaagtctctgtaccagctggaaaactactgctaacgaagcacctcgctaaaaaaaaaaaaaaaaaaaaaaaaa

SEQ ID NO: 522 - DNA, 90 bp, synthetic construct
  misc_feature 1..90: note = Description of sequence: Primer
  source 1..90: mol_type = other DNA
atggacgacgacgacaaggtttgcggtgaacgtggtttcttctacacctaacgaagcacctcgctaaaaaaaaaaaaaaaaaaaaaaaaa

SEQ ID NO: 523 - DNA, 90 bp, synthetic construct
  misc_feature 1..90: note = Description of sequence: Primer
  source 1..90: mol_type = other DNA
atggacgacgacgacaaggctctgtggggtccggacccggctgctgcttaacgaagcacctcgctaaaaaaaaaaaaaaaaaaaaaaaaa

SEQ ID NO: 524 - DNA, 87 bp, synthetic construct
  misc_feature 1..87: note = Description of sequence: Primer
  source 1..87: mol_type = other DNA
atggacgacgacgacaagcgtctgctgccgctgctggctctgctgtaacgaagcacctcgctaaaaaaaaaaaaaaaaaaaaaaaaa

SEQ ID NO: 525 - DNA, 84 bp, synthetic construct
  misc_feature 1..84: note = Description of sequence: Primer
  source 1..84: mol_type = other DNA
atggacgacgacgacaagtggggtccggacccggctgctgcttaacgaagcacctcgctaaaaaaaaaaaaaaaaaaaaaaaaa

SEQ ID NO: 526 - DNA, 87 bp, synthetic construct
  misc_feature 1..87: note = Description of sequence: Primer
  source 1..87: mol_type = other DNA
atggacgacgacgacaagttcctgatcgttctgtctgttgctctgtaacgaagcacctcgctaaaaaaaaaaaaaaaaaaaaaaaaa

SEQ ID NO: 527 - DNA, 87 bp, synthetic construct
  misc_feature 1..87: note = Description of sequence: Primer
  source 1..87: mol_type = other DNA
atggacgacgacgacaagaaactgcaggttttcctgatcgttctgtaacgaagcacctcgctaaaaaaaaaaaaaaaaaaaaaaaaa

SEQ ID NO: 528 - DNA, 87 bp, synthetic construct
  misc_feature 1..87: note = Description of sequence: Primer
  source 1..87: mol_type = other DNA
atggacgacgacgacaagttcctgtggtctgttttcatgctgatctaacgaagcacctcgctaaaaaaaaaaaaaaaaaaaaaaaaa

SEQ ID NO: 529 - DNA, 87 bp, synthetic construct
  misc_feature 1..87: note = Description of sequence: Primer
  source 1..87: mol_type = other DNA
atggacgacgacgacaagttcctgttcgctgttggtttctacctgtaacgaagcacctcgctaaaaaaaaaaaaaaaaaaaaaaaaa

SEQ ID NO: 530 - DNA, 87 bp, synthetic construct
  misc_feature 1..87: note = Description of sequence: Primer
  source 1..87: mol_type = other DNA
atggacgacgacgacaagctgaacatcgacctgctgtggtctgtttaacgaagcacctcgctaaaaaaaaaaaaaaaaaaaaaaaaa

SEQ ID NO: 531 - DNA, 87 bp, synthetic construct
  misc_feature 1..87: note = Description of sequence: Primer
  source 1..87: mol_type = other DNA
atggacgacgacgacaaggttctgttcggtctgggtttcgctatctaacgaagcacctcgctaaaaaaaaaaaaaaaaaaaaaaaaa

SEQ ID NO: 532 - DNA, 87 bp, synthetic construct
  misc_feature 1..87: note = Description of sequence: Primer
  source 1..87: mol_type = other DNA
atggacgacgacgacaagttcctgtggtctgttttctggctgatctaacgaagcacctcgctaaaaaaaaaaaaaaaaaaaaaaaaa

SEQ ID NO: 533 - DNA, 87 bp, synthetic construct
  misc_feature 1..87: note = Description of sequence: Primer
  source 1..87: mol_type = other DNA
atggacgacgacgacaagaacctgttcctgttcctgttcgctgtttaacgaagcacctcgctaaaaaaaaaaaaaaaaaaaaaaaaa

SEQ ID NO: 534 - DNA, 87 bp, synthetic construct
  misc_feature 1..87: note = Description of sequence: Primer
  source 1..87: mol_type = other DNA
atggacgacgacgacaagtacctgctgctgcgtgttctgaacatctaacgaagcacctcgctaaaaaaaaaaaaaaaaaaaaaaaaa

SEQ ID NO: 535 - DNA, 90 bp, synthetic construct
  misc_feature 1..90: note = Description of sequence: Primer
  source 1..90: mol_type = other DNA
atggacgacgacgacaagcacctgtgcggttctcacctggttgaagcttaacgaagcacctcgctaaaaaaaaaaaaaaaaaaaaaaaaa

SEQ ID NO: 536 - DNA, 90 bp, synthetic construct
  misc_feature 1..90: note = Description of sequence: Primer
  source 1..90: mol_type = other DNA
atggacgacgacgacaagtctcacctggttgaagctctgtacctggtttaacgaagcacctcgctaaaaaaaaaaaaaaaaaaaaaaaaa

SEQ ID NO: 537 - DNA, 90 bp, synthetic construct
  misc_feature 1..90: note = Description of sequence: Primer
  source 1..90: mol_type = other DNA
atggacgacgacgacaagctgtgcggttctcacctggttgaagctctgtaacgaagcacctcgctaaaaaaaaaaaaaaaaaaaaaaaaa

SEQ ID NO: 538 - DNA, 87 bp, synthetic construct
  misc_feature 1..87: note = Description of sequence: Primer
  source 1..87: mol_type = other DNA
atggacgacgacgacaaggctctgaccgctgttgctgaagaagtttaacgaagcacctcgctaaaaaaaaaaaaaaaaaaaaaaaaa

SEQ ID NO: 539 - DNA, 90 bp, synthetic construct
  misc_feature 1..90: note = Description of sequence: Primer
  source 1..90: mol_type = other DNA
atggacgacgacgacaagtctctgtaccacgtttacgaagttaacctgtaacgaagcacctcgctaaaaaaaaaaaaaaaaaaaaaaaaa

SEQ ID NO: 540 - DNA, 87 bp, synthetic construct
  misc_feature 1..87: note = Description of sequence: Primer
  source 1..87: mol_type = other DNA
atggacgacgacgacaagaccatcgctgacttctggcagatggtttaacgaagcacctcgctaaaaaaaaaaaaaaaaaaaaaaaaa

SEQ ID NO: 541 - DNA, 87 bp, synthetic construct
  misc_feature 1..87: note = Description of sequence: Primer
  source 1..87: mol_type = other DNA
atggacgacgacgacaaggttatcgttatgctgaccccgctggtttaacgaagcacctcgctaaaaaaaaaaaaaaaaaaaaaaaaa

SEQ ID NO: 542 - DNA, 87 bp, synthetic construct
  misc_feature 1..87: note = Description of sequence: Primer
  source 1..87: mol_type = other DNA
atggacgacgacgacaagctgctgccgccgctgctggaacacctgtaacgaagcacctcgctaaaaaaaaaaaaaaaaaaaaaaaaa

SEQ ID NO: 543 - DNA, 87 bp, synthetic construct
  misc_feature 1..87: note = Description of sequence: Primer
  source 1..87: mol_type = other DNA
atggacgacgacgacaagtctctggctgctggtgttaaactgctgtaacgaagcacctcgctaaaaaaaaaaaaaaaaaaaaaaaaa

SEQ ID NO: 544 - DNA, 87 bp, synthetic construct
  misc_feature 1..87: note = Description of sequence: Primer
  source 1..87: mol_type = other DNA
atggacgacgacgacaagtctctgtctccgctgcaggctgaactgtaacgaagcacctcgctaaaaaaaaaaaaaaaaaaaaaaaaa

SEQ ID NO: 545 - DNA, 87 bp, synthetic construct
  misc_feature 1..87: note = Description of sequence: Primer
  source 1..87: mol_type = other DNA
atggacgacgacgacaagatggtttgggaatctggttgcaccgtttaacgaagcacctcgctaaaaaaaaaaaaaaaaaaaaaaaaa

SEQ ID NO: 546 - DNA, 90 bp, synthetic construct
  misc_feature 1..90: note = Description of sequence: Primer
  source 1..90: mol_type = other DNA
atggacgacgacgacaaggttatgatcatcgtttcttctctggctgtttaacgaagcacctcgctaaaaaaaaaaaaaaaaaaaaaaaaa

SEQ ID NO: 547 - DNA, 87 bp, synthetic construct
  misc_feature 1..87: note = Description of sequence: Primer
  source 1..87: mol_type = other DNA
atggacgacgacgacaaggctctgggtgacctgttccagtctatctaacgaagcacctcgctaaaaaaaaaaaaaaaaaaaaaaaaa

SEQ ID NO: 548 - DNA, 87 bp, synthetic construct
  misc_feature 1..87: note = Description of sequence: Primer
  source 1..87: mol_type = other DNA
atggacgacgacgacaaggacctgacctctttcctgctgtctctgtaacgaagcacctcgctaaaaaaaaaaaaaaaaaaaaaaaaa

SEQ ID NO: 549 - DNA, 87 bp, synthetic construct
  misc_feature 1..87: note = Description of sequence: Primer
  source 1..87: mol_type = other DNA
atggacgacgacgacaaggaaatcctgggtgctctgctgtctatctaacgaagcacctcgctaaaaaaaaaaaaaaaaaaaaaaaaa

SEQ ID NO: 550 - DNA, 90 bp, synthetic construct
  misc_feature 1..90: note = Description of sequence: Primer
  source 1..90: mol_type = other DNA
atggacgacgacgacaagttcctgctgtctctgttctctctgtggctgtaacgaagcacctcgctaaaaaaaaaaaaaaaaaaaaaaaaa

SEQ ID NO: 551 - DNA, 90 bp, synthetic construct
  misc_feature 1..90: note = Description of sequence: Primer
  source 1..90: mol_type = other DNA
atggacgacgacgacaagatcctggctgttgacggtgttctgtctgtttaacgaagcacctcgctaaaaaaaaaaaaaaaaaaaaaaaaa

SEQ ID NO: 552 - DNA, 87 bp, synthetic construct
  misc_feature 1..87: note = Description of sequence: Primer
  source 1..87: mol_type = other DNA
atggacgacgacgacaagatcctgggtgctctgctgtctatcctgtaacgaagcacctcgctaaaaaaaaaaaaaaaaaaaaaaaaa

SEQ ID NO: 553 - DNA, 87 bp, synthetic construct
  misc_feature 1..87: note = Description of sequence: Primer
  source 1..87: mol_type = other DNA
atggacgacgacgacaagatcctgaaagacttctctatcctgctgtaacgaagcacctcgctaaaaaaaaaaaaaaaaaaaaaaaaa

SEQ ID NO: 554 - DNA, 87 bp, synthetic construct
  misc_feature 1..87: note = Description of sequence: Primer
  source 1..87: mol_type = other DNA
atggacgacgacgacaagatcctgtctgctcacgttgctaccgcttaacgaagcacctcgctaaaaaaaaaaaaaaaaaaaaaaaaa

SEQ ID NO: 555 - DNA, 87 bp, synthetic construct
  misc_feature 1..87: note = Description of sequence: Primer
  source 1..87: mol_type = other DNA
atggacgacgacgacaagctgctgatcgacctgacctctttcctgtaacgaagcacctcgctaaaaaaaaaaaaaaaaaaaaaaaaa

SEQ ID NO: 556 - DNA, 90 bp, synthetic construct
  misc_feature 1..90: note = Description of sequence: Primer
  source 1..90: mol_type = other DNA
atggacgacgacgacaagctgctgatggaaggtgttccgaaatctctgtaacgaagcacctcgctaaaaaaaaaaaaaaaaaaaaaaaaa

SEQ ID NO: 557 - DNA, 87 bp, synthetic construct
  misc_feature 1..87: note = Description of sequence: Primer
  source 1..87: mol_type = other DNA
atggacgacgacgacaagtctatctctgttctgatctctgctctgtaacgaagcacctcgctaaaaaaaaaaaaaaaaaaaaaaaaa

SEQ ID NO: 558 - DNA, 90 bp, synthetic construct
  misc_feature 1..90: note = Description of sequence: Primer
  source 1..90: mol_type = other DNA
atggacgacgacgacaagtctctgaactactctggtgttaaagaactgtaacgaagcacctcgctaaaaaaaaaaaaaaaaaaaaaaaaa

SEQ ID NO: 559 - DNA, 90 bp, synthetic construct
  misc_feature 1..90: note = Description of sequence: Primer
  source 1..90: mol_type = other DNA
atggacgacgacgacaagtctgttcactctctgcacatctggtctctgtaacgaagcacctcgctaaaaaaaaaaaaaaaaaaaaaaaaa

SEQ ID NO: 560 - DNA, 87 bp, synthetic construct
  misc_feature 1..87: note = Description of sequence: Primer
  source 1..87: mol_type = other DNA
atggacgacgacgacaaggttgttaccggtgttctggtttacctgtaacgaagcacctcgctaaaaaaaaaaaaaaaaaaaaaaaaa

SEQ ID NO: 561 - DNA, 87 bp, synthetic construct
  misc_feature 1..87: note = Description of sequence: Primer
  source 1..87: mol_type = other DNA
atggacgacgacgacaagttcatcttctctatcctggttctggcttaacgaagcacctcgctaaaaaaaaaaaaaaaaaaaaaaaaa

SEQ ID NO: 562 - DNA, 87 bp, synthetic construct
  misc_feature 1..87: note = Description of sequence: Primer
  source 1..87: mol_type = other DNA
atggacgacgacgacaagatccaggctaccgttatgatcatcgtttaacgaagcacctcgctaaaaaaaaaaaaaaaaaaaaaaaaa

SEQ ID NO: 563 - DNA, 87 bp, synthetic construct
  misc_feature 1..87: note = Description of sequence: Primer
  source 1..87: mol_type = other DNA
atggacgacgacgacaagaaaatgtacgctttcaccctggaatcttaacgaagcacctcgctaaaaaaaaaaaaaaaaaaaaaaaaa

SEQ ID NO: 564 - DNA, 87 bp, synthetic construct
  misc_feature 1..87: note = Description of sequence: Primer
  source 1..87: mol_type = other DNA
atggacgacgacgacaagaaatctctgaactactctggtgttaaataacgaagcacctcgctaaaaaaaaaaaaaaaaaaaaaaaaa

SEQ ID NO: 565 - DNA, 87 bp, synthetic construct
  misc_feature 1..87: note = Description of sequence: Primer
  source 1..87: mol_type = other DNA
atggacgacgacgacaagctggctgttgacggtgttctgtctgtttaacgaagcacctcgctaaaaaaaaaaaaaaaaaaaaaaaaa

SEQ ID NO: 566 - DNA, 87 bp, synthetic construct
  misc_feature 1..87: note = Description of sequence: Primer
  source 1..87: mol_type = other DNA
atggacgacgacgacaagctgctgtctctgttctctctgtggctgtaacgaagcacctcgctaaaaaaaaaaaaaaaaaaaaaaaaa

SEQ ID NO: 567 - DNA, 87 bp, synthetic construct
  misc_feature 1..87: note = Description of sequence: Primer
  source 1..87: mol_type = other DNA
atggacgacgacgacaagcgtctgctgtacccggactaccagatctaacgaagcacctcgctaaaaaaaaaaaaaaaaaaaaaaaaa

SEQ ID NO: 568 - DNA, 87 bp, synthetic construct
  misc_feature 1..87: note = Description of sequence: Primer
  source 1..87: mol_type = other DNA
atggacgacgacgacaagaccatgcactctctgaccatccagatgtaacgaagcacctcgctaaaaaaaaaaaaaaaaaaaaaaaaa

SEQ ID NO: 569 - DNA, 87 bp, synthetic construct
  misc_feature 1..87: note = Description of sequence: Primer
  source 1..87: mol_type = other DNA
atggacgacgacgacaaggttgctgctaacatcgttctgaccgtttaacgaagcacctcgctaaaaaaaaaaaaaaaaaaaaaaaaa

SEQ ID NO: 570 - DNA, 87 bp, synthetic construct
  misc_feature 1..87: note = Description of sequence: Primer
  source 1..87: mol_type = other DNA
atggacgacgacgacaagtgcctgggtcacaaccacaaagaagtttaacgaagcacctcgctaaaaaaaaaaaaaaaaaaaaaaaaa

SEQ ID NO: 571 - DNA, 90 bp, synthetic construct
  misc_feature 1..90: note = Description of sequence: Primer
  source 1..90: mol_type = other DNA
atggacgacgacgacaagaaaatcgctgacccgatctgcaccttcatctaacgaagcacctcgctaaaaaaaaaaaaaaaaaaaaaaaaa

SEQ ID NO: 572 - DNA, 90 bp, synthetic construct
  misc_feature 1..90: note = Description of sequence: Primer
  source 1..90: mol_type = other DNA
atggacgacgacgacaagaaaatgtacgctttcaccctggaatctgtttaacgaagcacctcgctaaaaaaaaaaaaaaaaaaaaaaaaa

SEQ ID NO: 573 - DNA, 90 bp, synthetic construct
  misc_feature 1..90: note = Description of sequence: Primer
  source 1..90: mol_type = other DNA
atggacgacgacgacaagctgctgatcgacctgacctctttcctgctgtaacgaagcacctcgctaaaaaaaaaaaaaaaaaaaaaaaaa

SEQ ID NO: 574 - DNA, 87 bp, synthetic construct
  misc_feature 1..87: note = Description of sequence: Primer
  source 1..87: mol_type = other DNA
atggacgacgacgacaagctgctgtctatcctgtgcatctgggtttaacgaagcacctcgctaaaaaaaaaaaaaaaaaaaaaaaaa

SEQ ID NO: 575 - DNA, 90 bp, synthetic construct
  misc_feature 1..90: note = Description of sequence: Primer
  source 1..90: mol_type = other DNA
atggacgacgacgacaagtctctgtacaacaccgttgctaccctgtactaacgaagcacctcgctaaaaaaaaaaaaaaaaaaaaaaaaa

SEQ ID NO: 576 - DNA, 90 bp, synthetic construct
  misc_feature 1..90: note = Description of sequence: Primer
  source 1..90: mol_type = other DNA
atggacgacgacgacaagttcctgggtaaaatctggccgtcttacaaataacgaagcacctcgctaaaaaaaaaaaaaaaaaaaaaaaaa

SEQ ID NO: 577 - DNA, 87 bp, synthetic construct
  misc_feature 1..87: note = Description of sequence: Primer
  source 1..87: mol_type = other DNA
atggacgacgacgacaagctggttggtccgaccccggttaacatctaacgaagcacctcgctaaaaaaaaaaaaaaaaaaaaaaaaa

SEQ ID NO: 578 - DNA, 87 bp, synthetic construct
  misc_feature 1..87: note = Description of sequence: Primer
  source 1..87: mol_type = other DNA
atggacgacgacgacaaggctctggttgaaatctgcaccgaaatgtaacgaagcacctcgctaaaaaaaaaaaaaaaaaaaaaaaaa

SEQ ID NO: 579 - DNA, 87 bp, synthetic construct
  misc_feature 1..87: note = Description of sequence: Primer
  source 1..87: mol_type = other DNA
atggacgacgacgacaaggttatctaccagtacatggacgacctgtaacgaagcacctcgctaaaaaaaaaaaaaaaaaaaaaaaaa

SEQ ID NO: 580 - DNA, 87 bp, synthetic construct
  misc_feature 1..87: note = Description of sequence: Primer
  source 1..87: mol_type = other DNA
atggacgacgacgacaagatcctgaaagaaccggttcacggtgtttaacgaagcacctcgctaaaaaaaaaaaaaaaaaaaaaaaaa

SEQ ID NO: 581 - DNA, 87 bp, synthetic construct
  misc_feature 1..87: note = Description of sequence: Primer
  source 1..87: mol_type = other DNA
atggacgacgacgacaaggctatcatccgtatcctgcagcagctgtaacgaagcacctcgctaaaaaaaaaaaaaaaaaaaaaaaaa

SEQ ID NO: 582 - DNA, 90 bp, synthetic construct
  misc_feature 1..90: note = Description of sequence: Primer
  source 1..90: mol_type = other DNA
atggacgacgacgacaagcgtggtccgggtcgtgctttcgttaccatctaacgaagcacctcgctaaaaaaaaaaaaaaaaaaaaaaaaa

SEQ ID NO: 583 - DNA, 90 bp, synthetic construct
  misc_feature 1..90: note = Description of sequence: Primer
  source 1..90: mol_type = other DNA
atggacgacgacgacaagtctctgctgaacgctaccgacatcgctgtttaacgaagcacctcgctaaaaaaaaaaaaaaaaaaaaaaaaa

SEQ ID NO: 584 - DNA, 87 bp, synthetic construct
  misc_feature 1..87: note = Description of sequence: Primer
  source 1..87: mol_type = other DNA
atggacgacgacgacaagctgctgaacgctaccgacatcgctgtttaacgaagcacctcgctaaaaaaaaaaaaaaaaaaaaaaaaa

SEQ ID NO: 585 - DNA, 90 bp, synthetic construct
  misc_feature 1..90: note = Description of sequence: Primer
  source 1..90: mol_type = other DNA
atggacgacgacgacaagccgctgaccttcggttggtgctacaaactgtaacgaagcacctcgctaaaaaaaaaaaaaaaaaaaaaaaaa

SEQ ID NO: 586 - DNA, 90 bp, synthetic construct
  misc_feature 1..90: note = Description of sequence: Primer
  source 1..90: mol_type = other DNA
atggacgacgacgacaaggttctggaatggcgtttcgactctcgtctgtaacgaagcacctcgctaaaaaaaaaaaaaaaaaaaaaaaaa

SEQ ID NO: 587 - DNA, 87 bp, synthetic construct
  misc_feature 1..87: note = Description of sequence: Primer
  source 1..87: mol_type = other DNA
atggacgacgacgacaagggtatcctgggtttcgttttcaccctgtaacgaagcacctcgctaaaaaaaaaaaaaaaaaaaaaaaaa

SEQ ID NO: 588 - DNA, 90 bp, synthetic construct
  misc_feature 1..90: note = Description of sequence: Primer
  source 1..90: mol_type = other DNA
atggacgacgacgacaagaaactgtaccagaacccgaccacctacatctaacgaagcacctcgctaaaaaaaaaaaaaaaaaaaaaaaaa

SEQ ID NO: 589 - DNA, 90 bp, synthetic construct
  misc_feature 1..90: note = Description of sequence: Primer
  source 1..90: mol_type = other DNA
atggacgacgacgacaagcgtctgtaccagaacccgaccacctacatctaacgaagcacctcgctaaaaaaaaaaaaaaaaaaaaaaaaa

SEQ ID NO: 590 - DNA, 87 bp, synthetic construct
  misc_feature 1..87: note = Description of sequence: Primer
  source 1..87: mol_type = other DNA
atggacgacgacgacaaggctatcatggacaaaaacatcatcctgtaacgaagcacctcgctaaaaaaaaaaaaaaaaaaaaaaaaa

SEQ ID NO: 591 - DNA, 87 bp, synthetic construct
  misc_feature 1..87: note = Description of sequence: Primer
  source 1..87: mol_type = other DNA
atggacgacgacgacaagttcatgtactctgacttccacttcatctaacgaagcacctcgctaaaaaaaaaaaaaaaaaaaaaaaaa

SEQ ID NO: 592 - DNA, 90 bp, synthetic construct
  misc_feature 1..90: note = Description of sequence: Primer
  source 1..90: mol_type = other DNA
atggacgacgacgacaagaaactggttgctctgggtatcaacgctgtttaacgaagcacctcgctaaaaaaaaaaaaaaaaaaaaaaaaa

SEQ ID NO: 593 - DNA, 90 bp, synthetic construct
  misc_feature 1..90: note = Description of sequence: Primer
  source 1..90: mol_type = other DNA
atggacgacgacgacaagctgctgttcaacatcctgggtggttgggtttaacgaagcacctcgctaaaaaaaaaaaaaaaaaaaaaaaaa

SEQ ID NO: 594 - DNA, 87 bp, synthetic construct
  misc_feature 1..87: note = Description of sequence: Primer
  source 1..87: mol_type = other DNA
atggacgacgacgacaagtgcatcaacggtgtttgctggaccgtttaacgaagcacctcgctaaaaaaaaaaaaaaaaaaaaaaaaa

SEQ ID NO: 595 - DNA, 90 bp, synthetic construct
  misc_feature 1..90: note = Description of sequence: Primer
  source 1..90: mol_type = other DNA
atggacgacgacgacaagtacctgctgccgcgtcgtggtccgcgtctgtaacgaagcacctcgctaaaaaaaaaaaaaaaaaaaaaaaaa

SEQ ID NO: 596 - DNA, 90 bp, synthetic construct
  misc_feature 1..90: note = Description of sequence: Primer
  source 1..90: mol_type = other DNA
atggacgacgacgacaagtacctggttgctctgggtatcaacgctgtttaacgaagcacctcgctaaaaaaaaaaaaaaaaaaaaaaaaa

SEQ ID NO: 597 - DNA, 90 bp, synthetic construct
  misc_feature 1..90: note = Description of sequence: Primer
  source 1..90: mol_type = other DNA
atggacgacgacgacaagtacctggttgctctgggtgttaacgctgtttaacgaagcacctcgctaaaaaaaaaaaaaaaaaaaaaaaaa

SEQ ID NO: 598 - DNA, 90 bp, synthetic construct
  misc_feature 1..90: note = Description of sequence: Primer
  source 1..90: mol_type = other DNA
atggacgacgacgacaagaaactggttgctctgggtatcaacaacgtttaacgaagcacctcgctaaaaaaaaaaaaaaaaaaaaaaaaa

SEQ ID NO: 599 - DNA, 90 bp, synthetic construct
  misc_feature 1..90: note = Description of sequence: Primer
  source 1..90: mol_type = other DNA
atggacgacgacgacaagtctctggttgctctgggtatcaacgctgtttaacgaagcacctcgctaaaaaaaaaaaaaaaaaaaaaaaaa

SEQ ID NO: 600 - DNA, 90 bp, synthetic construct
  misc_feature 1..90: note = Description of sequence: Primer
  source 1..90: mol_type = other DNA
atggacgacgacgacaagaaaatcgttgctctgggtatcaacgctgtttaacgaagcacctcgctaaaaaaaaaaaaaaaaaaaaaaaaa

SEQ ID NO: 601 - DNA, 87 bp, synthetic construct
  misc_feature 1..87: note = Description of sequence: Primer
  source 1..87: mol_type = other DNA
atggacgacgacgacaagtgcctgggtggtctgctgaccatggtttaacgaagcacctcgctaaaaaaaaaaaaaaaaaaaaaaaaa

SEQ ID NO: 602 - DNA, 87 bp, synthetic construct
  misc_feature 1..87: note = Description of sequence: Primer
  source 1..87: mol_type = other DNA
atggacgacgacgacaagtacctgcagcagaactggtggaccctgtaacgaagcacctcgctaaaaaaaaaaaaaaaaaaaaaaaaa

SEQ ID NO: 603 - DNA, 87 bp, synthetic construct
  misc_feature 1..87: note = Description of sequence: Primer
  source 1..87: mol_type = other DNA
atggacgacgacgacaagtacctgctggaaatgctgtggcgtctgtaacgaagcacctcgctaaaaaaaaaaaaaaaaaaaaaaaaa

SEQ ID NO: 604 - DNA, 87 bp, synthetic construct
  misc_feature 1..87: note = Description of sequence: Primer
  source 1..87: mol_type = other DNA
atggacgacgacgacaagtacgttctggaccacctgatcgttgtttaacgaagcacctcgctaaaaaaaaaaaaaaaaaaaaaaaaa

SEQ ID NO: 605 - DNA, 87 bp, synthetic construct
  misc_feature 1..87: note = Description of sequence: Primer
  source 1..87: mol_type = other DNA
atggacgacgacgacaagggtctgtgcaccctggttgctatgctgtaacgaagcacctcgctaaaaaaaaaaaaaaaaaaaaaaaaa

SEQ ID NO: 606 - DNA, 84 bp, synthetic construct
  misc_feature 1..84: note = Description of sequence: Primer
  source 1..84: mol_type = other DNA
atggacgacgacgacaagtacctgctgccgggttggaaactgtaacgaagcacctcgctaaaaaaaaaaaaaaaaaaaaaaaaa

SEQ ID NO: 607 - DNA, 87 bp, synthetic construct
  misc_feature 1..87: note = Description of sequence: Primer
  source 1..87: mol_type = other DNA
atggacgacgacgacaagtctctgatctctggtatgtggctgctgtaacgaagcacctcgctaaaaaaaaaaaaaaaaaaaaaaaaa

SEQ ID NO: 608 - DNA, 87 bp, synthetic construct
  misc_feature 1..87: note = Description of sequence: Primer
  source 1..87: mol_type = other DNA
atggacgacgacgacaagaccctgctggctaacgttaccgctgtttaacgaagcacctcgctaaaaaaaaaaaaaaaaaaaaaaaaa

SEQ ID NO: 609 - DNA, 87 bp, synthetic construct
  misc_feature 1..87: note = Description of sequence: Primer
  source 1..87: mol_type = other DNA
atggacgacgacgacaagttcctgtacgctctggctctgctgctgtaacgaagcacctcgctaaaaaaaaaaaaaaaaaaaaaaaaa

SEQ ID NO: 610 - DNA, 87 bp, synthetic construct
  misc_feature 1..87: note = Description of sequence: Primer
  source 1..87: mol_type = other DNA
atggacgacgacgacaaggaagttaaagaaaaacacgaattcctgtaacgaagcacctcgctaaaaaaaaaaaaaaaaaaaaaaaaa

SEQ ID NO: 611 - DNA, 90 bp, synthetic construct
  misc_feature 1..90: note = Description of sequence: Primer
  source 1..90: mol_type = other DNA
atggacgacgacgacaagatcctgatgaacgaccaggaagttggtgtttaacgaagcacctcgctaaaaaaaaaaaaaaaaaaaaaaaaa

SEQ ID NO: 612 - DNA, 87 bp, synthetic construct
  misc_feature 1..87: note = Description of sequence: Primer
  source 1..87: mol_type = other DNA
atggacgacgacgacaagggtatcatctacatcatctacaaactgtaacgaagcacctcgctaaaaaaaaaaaaaaaaaaaaaaaaa

SEQ ID NO: 613 - DNA, 90 bp, synthetic construct
  misc_feature 1..90: note = Description of sequence: Primer
  source 1..90: mol_type = other DNA
atggacgacgacgacaaggaagctgctggtatcggtatcctgaccgtttaacgaagcacctcgctaaaaaaaaaaaaaaaaaaaaaaaaa

SEQ ID NO: 614 - DNA, 90 bp, synthetic construct
  misc_feature 1..90: note = Description of sequence: Primer
  source 1..90: mol_type = other DNA
atggacgacgacgacaaggaactggctggtatcggtatcctgaccgtttaacgaagcacctcgctaaaaaaaaaaaaaaaaaaaaaaaaa

SEQ ID NO: 615 - DNA, 90 bp, synthetic construct
  misc_feature 1..90: note = Description of sequence: Primer
  source 1..90: mol_type = other DNA
atggacgacgacgacaaggctctggctggtatcggtatcctgaccgtttaacgaagcacctcgctaaaaaaaaaaaaaaaaaaaaaaaaa

SEQ ID NO: 616 - DNA, 87 bp, synthetic construct
  misc_feature 1..87: note = Description of sequence: Primer
  source 1..87: mol_type = other DNA
atggacgacgacgacaaggctgctggtatcggtatcctgaccgtttaacgaagcacctcgctaaaaaaaaaaaaaaaaaaaaaaaaa

SEQ ID NO: 617 - DNA, 87 bp, synthetic construct
  misc_feature 1..87: note = Description of sequence: Primer
  source 1..87: mol_type = other DNA
atggacgacgacgacaaggctctgggtatcggtatcctgaccgtttaacgaagcacctcgctaaaaaaaaaaaaaaaaaaaaaaaaa

SEQ ID NO: 618 - DNA, 90 bp, synthetic construct
  misc_feature 1..90: note = Description of sequence: Primer
  source 1..90: mol_type = other DNA
atggacgacgacgacaagctgctggctggtatcggtaccgttccgatctaacgaagcacctcgctaaaaaaaaaaaaaaaaaaaaaaaaa

SEQ ID NO: 619 - DNA, 84 bp, synthetic construct
  misc_feature 1..84: note = Description of sequence: Primer
  source 1..84: mol_type = other DNA
atggacgacgacgacaagtgcacctctatctgctctctgtactaacgaagcacctcgctaaaaaaaaaaaaaaaaaaaaaaaaa

SEQ ID NO: 620 - DNA, 90 bp, synthetic construct
  misc_feature 1..90: note = Description of sequence: Primer
  source 1..90: mol_type = other DNA
atggacgacgacgacaagtgcggttctcacctggttgaagctctgtactaacgaagcacctcgctaaaaaaaaaaaaaaaaaaaaaaaaa

SEQ ID NO: 621 - DNA, 87 bp, synthetic construct
  misc_feature 1..87: note = Description of sequence: Primer
  source 1..87: mol_type = other DNA
atggacgacgacgacaagggttctcacctggttgaagctctgtactaacgaagcacctcgctaaaaaaaaaaaaaaaaaaaaaaaaa

SEQ ID NO: 622 - DNA, 87 bp, synthetic construct
  misc_feature 1..87: note = Description of sequence: Primer
  source 1..87: mol_type = other DNA
atggacgacgacgacaagtgcctggaactggctgaatacctgtactaacgaagcacctcgctaaaaaaaaaaaaaaaaaaaaaaaaa

SEQ ID NO: 623 - DNA, 90 bp, synthetic construct
  misc_feature 1..90: note = Description of sequence: Primer
  source 1..90: mol_type = other DNA
atggacgacgacgacaagtctaccgctaacaccaacatgttcacctactaacgaagcacctcgctaaaaaaaaaaaaaaaaaaaaaaaaa

SEQ ID NO: 624 - DNA, 90 bp, synthetic construct
  misc_feature 1..90: note = Description of sequence: Primer
  source 1..90: mol_type = other DNA
atggacgacgacgacaagaaatgcctggaactggctgaatacctgtactaacgaagcacctcgctaaaaaaaaaaaaaaaaaaaaaaaaa

SEQ ID NO: 625 - DNA, 90 bp, synthetic construct
  misc_feature 1..90: note = Description of sequence: Primer
  source 1..90: mol_type = other DNA
atggacgacgacgacaagcagcaggacaaacactacgacctgtcttactaacgaagcacctcgctaaaaaaaaaaaaaaaaaaaaaaaaa

SEQ ID NO: 626 - DNA, 90 bp, synthetic construct
  misc_feature 1..90: note = Description of sequence: Primer
  source 1..90: mol_type = other DNA
atggacgacgacgacaaggtttctgctaccgctggtaccaccgtttactaacgaagcacctcgctaaaaaaaaaaaaaaaaaaaaaaaaa

SEQ ID NO: 627 - DNA, 87 bp, synthetic construct
  misc_feature 1..87: note = Description of sequence: Primer
  source 1..87: mol_type = other DNA
atggacgacgacgacaagtctaccaaagttatcgacttccactactaacgaagcacctcgctaaaaaaaaaaaaaaaaaaaaaaaaa

SEQ ID NO: 628 - DNA, 87 bp, synthetic construct
  misc_feature 1..87: note = Description of sequence: Primer
  source 1..87: mol_type = other DNA
atggacgacgacgacaagtacctggcttgcgaacgtctgctgtactaacgaagcacctcgctaaaaaaaaaaaaaaaaaaaaaaaaa

SEQ ID NO: 629 - DNA, 87 bp, synthetic construct
  misc_feature 1..87: note = Description of sequence: Primer
  source 1..87: mol_type = other DNA
atggacgacgacgacaaggttaccgacgctgctcacctgctgatctaacgaagcacctcgctaaaaaaaaaaaaaaaaaaaaaaaaa

SEQ ID NO: 630 - DNA, 87 bp, synthetic construct
  misc_feature 1..87: note = Description of sequence: Primer
  source 1..87: mol_type = other DNA
atggacgacgacgacaagccgaccgaaaaaggtgctaacgaatactaacgaagcacctcgctaaaaaaaaaaaaaaaaaaaaaaaaa

SEQ ID NO: 631 - DNA, 87 bp, synthetic construct
  misc_feature 1..87: note = Description of sequence: Primer
  source 1..87: mol_type = other DNA
atggacgacgacgacaagctgatcgacctgacctctttcctgctgtaacgaagcacctcgctaaaaaaaaaaaaaaaaaaaaaaaaa

SEQ ID NO: 632 - DNA, 90 bp, synthetic construct
  misc_feature 1..90: note = Description of sequence: Primer
  source 1..90: mol_type = other DNA
atggacgacgacgacaagaaaccgaccgaaaaaggtgctaacgaatactaacgaagcacctcgctaaaaaaaaaaaaaaaaaaaaaaaaa

SEQ ID NO: 633 - DNA, 90 bp, synthetic construct
  misc_feature 1..90: note = Description of sequence: Primer
  source 1..90: mol_type = other DNA
atggacgacgacgacaaggttgttaccgacgctgctcacctgctgatctaacgaagcacctcgctaaaaaaaaaaaaaaaaaaaaaaaaa

SEQ ID NO: 634 - DNA, 87 bp, synthetic construct
  misc_feature 1..87: note = Description of sequence: Primer
  source 1..87: mol_type = other DNA
atggacgacgacgacaagctgacctctttcctgctgtctctgttctaacgaagcacctcgctaaaaaaaaaaaaaaaaaaaaaaaaa

SEQ ID NO: 635 - DNA, 87 bp, synthetic construct
  misc_feature 1..87: note = Description of sequence: Primer
  source 1..87: mol_type = other DNA
atggacgacgacgacaagtctaccaacgttggttctaacacctactaacgaagcacctcgctaaaaaaaaaaaaaaaaaaaaaaaaa

SEQ ID NO: 636 - DNA, 90 bp, synthetic construct
  misc_feature 1..90: note = Description of sequence: Primer
  source 1..90: mol_type = other DNA
atggacgacgacgacaagtcttctaccaacgttggttctaacacctactaacgaagcacctcgctaaaaaaaaaaaaaaaaaaaaaaaaa

SEQ ID NO: 637 - DNA, 90 bp, synthetic construct
  misc_feature 1..90: note = Description of sequence: Primer
  source 1..90: mol_type = other DNA
atggacgacgacgacaagctgacctctctgaccatcctgcagctgtactaacgaagcacctcgctaaaaaaaaaaaaaaaaaaaaaaaaa

SEQ ID NO: 638 - DNA, 87 bp, synthetic construct
  misc_feature 1..87: note = Description of sequence: Primer
  source 1..87: mol_type = other DNA
atggacgacgacgacaagccgacccacgaagaacacctgttctactaacgaagcacctcgctaaaaaaaaaaaaaaaaaaaaaaaaa

SEQ ID NO: 639 - DNA, 90 bp, synthetic construct
  misc_feature 1..90: note = Description of sequence: Primer
  source 1..90: mol_type = other DNA
atggacgacgacgacaagatcccgacccacgaagaacacctgttctactaacgaagcacctcgctaaaaaaaaaaaaaaaaaaaaaaaaa

SEQ ID NO: 640 - DNA, 87 bp, synthetic construct
  misc_feature 1..87: note = Description of sequence: Primer
  source 1..87: mol_type = other DNA
atggacgacgacgacaagacctctctgaccatcctgcagctgtactaacgaagcacctcgctaaaaaaaaaaaaaaaaaaaaaaaaa

SEQ ID NO: 641 - DNA, 87 bp, synthetic construct
  misc_feature 1..87: note = Description of sequence: Primer
  source 1..87: mol_type = other DNA
atggacgacgacgacaagtctaccggtcacatgatcctggcttactaacgaagcacctcgctaaaaaaaaaaaaaaaaaaaaaaaaa

SEQ ID NO: 642 - DNA, 87 bp, synthetic construct
  misc_feature 1..87: note = Description of sequence: Primer
  source 1..87: mol_type = other DNA
atggacgacgacgacaagttcggtgaccacccgggtcactcttactaacgaagcacctcgctaaaaaaaaaaaaaaaaaaaaaaaaa

SEQ ID NO: 643 - DNA, 90 bp, synthetic construct
  misc_feature 1..90: note = Description of sequence: Primer
  source 1..90: mol_type = other DNA
atggacgacgacgacaagatctctaccggtcacatgatcctggcttactaacgaagcacctcgctaaaaaaaaaaaaaaaaaaaaaaaaa

SEQ ID NO: 644 - DNA, 84 bp, synthetic construct
  misc_feature 1..84: note = Description of sequence: Primer
  source 1..84: mol_type = other DNA
atggacgacgacgacaagttccaggactctggtctgctgtactaacgaagcacctcgctaaaaaaaaaaaaaaaaaaaaaaaaa

SEQ ID NO: 645 - DNA, 90 bp, synthetic construct
  misc_feature 1..90: note = Description of sequence: Primer
  source 1..90: mol_type = other DNA
atggacgacgacgacaagcagctgttccaggactctggtctgctgtactaacgaagcacctcgctaaaaaaaaaaaaaaaaaaaaaaaaa

SEQ ID NO: 646 - DNA, 90 bp, synthetic construct
  misc_feature 1..90: note = Description of sequence: Primer
  source 1..90: mol_type = other DNA
atggacgacgacgacaagctgtcttggcacgacgacctgacccagtactaacgaagcacctcgctaaaaaaaaaaaaaaaaaaaaaaaaa

SEQ ID NO: 647 - DNA, 87 bp, synthetic construct
  misc_feature 1..87: note = Description of sequence: Primer
  source 1..87: mol_type = other DNA
atggacgacgacgacaagtggccggacgaaggtgcttctctgtactaacgaagcacctcgctaaaaaaaaaaaaaaaaaaaaaaaaa

SEQ ID NO: 648 - DNA, 87 bp, synthetic construct
  misc_feature 1..87: note = Description of sequence: Primer
  source 1..87: mol_type = other DNA
atggacgacgacgacaaggctctggacatcgaaatcgctacctactaacgaagcacctcgctaaaaaaaaaaaaaaaaaaaaaaaaa

SEQ ID NO: 649 - DNA, 90 bp, synthetic construct
  misc_feature 1..90: note = Description of sequence: Primer
  source 1..90: mol_type = other DNA
atggacgacgacgacaagctggctctggacatcgaaatcgctacctactaacgaagcacctcgctaaaaaaaaaaaaaaaaaaaaaaaaa

SEQ ID NO: 650 - DNA, 90 bp, synthetic construct; identical to SEQ ID NO: 522
  misc_feature 1..90: note = Description of sequence: Primer
  source 1..90: mol_type = other DNA

SEQ ID NO: 651 - DNA, 84 bp, synthetic construct
  misc_feature 1..84: note = Description of sequence: Primer
  source 1..84: mol_type = other DNA
atggacgacgacgacaagggtgaacgtggtttcttctacacctaacgaagcacctcgctaaaaaaaaaaaaaaaaaaaaaaaaa

SEQ ID NO: 652 - DNA, 90 bp, synthetic construct
  misc_feature 1..90: note = Description of sequence: Primer
  source 1..90: mol_type = other DNA
atggacgacgacgacaagctggtttgcggtgaacgtggtttcttctactaacgaagcacctcgctaaaaaaaaaaaaaaaaaaaaaaaaa

SEQ ID NO: 653 - DNA, 93 bp, synthetic construct
  misc_feature 1..93: note = Description of sequence: Primer
  source 1..93: mol_type = other DNA
atggacgacgacgacaaggctctgtggggtccggacccggctgctgctttctaacgaagcacctcgctaaaaaaaaaaaaaaaaaaaaaaaaa

SEQ ID NO: 654 - DNA, 87 bp, synthetic construct
  misc_feature 1..87: note = Description of sequence: Primer
  source 1..87: mol_type = other DNA
atggacgacgacgacaagtgcaccgaactgaaactgtctgactactaacgaagcacctcgctaaaaaaaaaaaaaaaaaaaaaaaaa

SEQ ID NO: 655 - DNA, 87 bp, synthetic construct
  misc_feature 1..87: note = Description of sequence: Primer
  source 1..87: mol_type = other DNA
atggacgacgacgacaagcactctaacctgaacgacgctacctactaacgaagcacctcgctaaaaaaaaaaaaaaaaaaaaaaaaa

SEQ ID NO: 656 - DNA, 87 bp, synthetic construct
  misc_feature 1..87: note = Description of sequence: Primer
  source 1..87: mol_type = other DNA
atggacgacgacgacaagaaatcttgcctgccggcttgcgtttactaacgaagcacctcgctaaaaaaaaaaaaaaaaaaaaaaaaa

SEQ ID NO: 657 - DNA, 90 bp, synthetic construct
  misc_feature 1..90: note = Description of sequence: Primer
  source 1..90: mol_type = other DNA
atggacgacgacgacaagctggtttctgacggtggtccgaacctgtactaacgaagcacctcgctaaaaaaaaaaaaaaaaaaaaaaaaa

SEQ ID NO: 658 - DNA, 87 bp, synthetic construct
  misc_feature 1..87: note = Description of sequence: Primer
  source 1..87: mol_type = other DNA
atggacgacgacgacaaggtttctgacggtggtccgaacctgtactaacgaagcacctcgctaaaaaaaaaaaaaaaaaaaaaaaaa

SEQ ID NO: 659 - DNA, 90 bp, synthetic construct
  misc_feature 1..90: note = Description of sequence: Primer
  source 1..90: mol_type = other DNA
atggacgacgacgacaaggctctggcttcttgcatgggtctgatctactaacgaagcacctcgctaaaaaaaaaaaaaaaaaaaaaaaaa

SEQ ID NO: 660 - DNA, 87 bp, synthetic construct
  misc_feature 1..87: note = Description of sequence: Primer
  source 1..87: mol_type = other DNA
atggacgacgacgacaagggttctgaagaactgcgttctctgtactaacgaagcacctcgctaaaaaaaaaaaaaaaaaaaaaaaaa

SEQ ID NO: 661 - DNA, 87 bp, synthetic construct
  misc_feature 1..87: note = Description of sequence: Primer
  source 1..87: mol_type = other DNA
atggacgacgacgacaagttccgtgactacgttgaccgtttctactaacgaagcacctcgctaaaaaaaaaaaaaaaaaaaaaaaaa

SEQ ID NO: 662 - DNA, 87 bp, synthetic construct
  misc_feature 1..87: note = Description of sequence: Primer
  source 1..87: mol_type = other DNA
atggacgacgacgacaagcagcgtccgctggttaccatcaaaatctaacgaagcacctcgctaaaaaaaaaaaaaaaaaaaaaaaaa

SEQ ID NO: 663 - DNA, 87 bp, synthetic construct
  misc_feature 1..87: note = Description of sequence: Primer
  source 1..87: mol_type = other DNA
atggacgacgacgacaagatctctgaacgtatcctgtctacctactaacgaagcacctcgctaaaaaaaaaaaaaaaaaaaaaaaaa

SEQ ID NO: 664 - DNA, 87 bp, synthetic construct
  misc_feature 1..87: note = Description of sequence: Primer
  source 1..87: mol_type = other DNA
atggacgacgacgacaagcgtcgtggttgggaagttctgaaatactaacgaagcacctcgctaaaaaaaaaaaaaaaaaaaaaaaaa

SEQ ID NO: 665 - DNA, 90 bp, synthetic construct
  misc_feature 1..90: note = Description of sequence: Primer
  source 1..90: mol_type = other DNA
atggacgacgacgacaagatggctctgtggatgcgtctgctgccgctgtaacgaagcacctcgctaaaaaaaaaaaaaaaaaaaaaaaaa

SEQ ID NO: 666 - DNA, 90 bp, synthetic construct
  misc_feature 1..90: note = Description of sequence: Primer
  source 1..90: mol_type = other DNA
atggacgacgacgacaagtggatgcgtctgctgccgctgctggctctgtaacgaagcacctcgctaaaaaaaaaaaaaaaaaaaaaaaaa

SEQ ID NO: 667 - DNA, 84 bp, synthetic construct
  misc_feature 1..84: note = Description of sequence: Primer
  source 1..84: mol_type = other DNA
atggacgacgacgacaagtggatgcgtctgctgccgctgctgtaacgaagcacctcgctaaaaaaaaaaaaaaaaaaaaaaaaa

SEQ ID NO: 668 - DNA, 84 bp, synthetic construct
  misc_feature 1..84: note = Description of sequence: Primer
  source 1..84: mol_type = other DNA
atggacgacgacgacaagctgtggatgcgtctgctgccgctgtaacgaagcacctcgctaaaaaaaaaaaaaaaaaaaaaaaaa

SEQ ID NO: 669 - DNA, 84 bp, synthetic construct
  misc_feature 1..84: note = Description of sequence: Primer
  source 1..84: mol_type = other DNA
atggacgacgacgacaagtctctgcagaaacgtggtatcgtttaacgaagcacctcgctaaaaaaaaaaaaaaaaaaaaaaaaa

SEQ ID NO: 670 - DNA, 84 bp, synthetic construct
  misc_feature 1..84: note = Description of sequence: Primer
  source 1..84: mol_type = other DNA
atggacgacgacgacaagatggctctgtggatgcgtctgctgtaacgaagcacctcgctaaaaaaaaaaaaaaaaaaaaaaaaa

SEQ ID NO: 671 - DNA, 84 bp, synthetic construct
  misc_feature 1..84: note = Description of sequence: Primer
  source 1..84: mol_type = other DNA
atggacgacgacgacaagatgatgatcgctcgtttcaaaatgtaacgaagcacctcgctaaaaaaaaaaaaaaaaaaaaaaaaa

SEQ ID NO: 672 - DNA, 87 bp, synthetic construct
  misc_feature 1..87: note = Description of sequence: Primer
  source 1..87: mol_type = other DNA
atggacgacgacgacaagatgatgatcgctcgtttcaaaatgttctaacgaagcacctcgctaaaaaaaaaaaaaaaaaaaaaaaaa

SEQ ID NO: 673 - DNA, 87 bp, synthetic construct
  misc_feature 1..87: note = Description of sequence: Primer
  source 1..87: mol_type = other DNA
atggacgacgacgacaagatgtctcgtaaacacaaatggaaactgtaacgaagcacctcgctaaaaaaaaaaaaaaaaaaaaaaaaa

SEQ ID NO: 674 - DNA, 90 bp, synthetic construct
  misc_feature 1..90: note = Description of sequence: Primer
  source 1..90: mol_type = other DNA
atggacgacgacgacaagctgatgtctcgtaaacacaaatggaaactgtaacgaagcacctcgctaaaaaaaaaaaaaaaaaaaaaaaaa

SEQ ID NO: 675 - DNA, 87 bp, synthetic construct
  misc_feature 1..87: note = Description of sequence: Primer
  source 1..87: mol_type = other DNA
atggacgacgacgacaagtctctgaaaaaaggtgctgctgctctgtaacgaagcacctcgctaaaaaaaaaaaaaaaaaaaaaaaaa

SEQ ID NO: 676 - DNA, 90 bp, synthetic construct
  misc_feature 1..90: note = Description of sequence: Primer
  source 1..90: mol_type = other DNA
atggacgacgacgacaagttctctctgaaaaaaggtgctgctgctctgtaacgaagcacctcgctaaaaaaaaaaaaaaaaaaaaaaaaa

SEQ ID NO: 677 - DNA, 84 bp, synthetic construct
  misc_feature 1..84: note = Description of sequence: Primer
  source 1..84: mol_type = other DNA
atggacgacgacgacaagcacccgcgttacttcaaccagctgtaacgaagcacctcgctaaaaaaaaaaaaaaaaaaaaaaaaa

SEQ ID NO: 678 - DNA, 84 bp, synthetic construct
  misc_feature 1..84: note = Description of sequence: Primer
  source 1..84: mol_type = other DNA
atggacgacgacgacaagctgatgcactgccagaccaccctgtaacgaagcacctcgctaaaaaaaaaaaaaaaaaaaaaaaaa

SEQ ID NO: 679 - DNA, 90 bp, synthetic construct
  misc_feature 1..90: note = Description of sequence: Primer
  source 1..90: mol_type = other DNA
atggacgacgacgacaaggctatgatgatcgctcgtttcaaaatgttctaacgaagcacctcgctaaaaaaaaaaaaaaaaaaaaaaaaa

SEQ ID NO: 680 - DNA, 90 bp, synthetic construct
  misc_feature 1..90: note = Description of sequence: Primer
  source 1..90: mol_type = other DNA
atggacgacgacgacaagatgtctcgtctgtctaaagttgctccggtttaacgaagcacctcgctaaaaaaaaaaaaaaaaaaaaaaaaa

SEQ ID NO: 681 - DNA, 90 bp, synthetic construct
  misc_feature 1..90: note = Description of sequence: Primer
  source 1..90: mol_type = other DNA
atggacgacgacgacaagatggctgctctgccgcgtctgatcgctttctaacgaagcacctcgctaaaaaaaaaaaaaaaaaaaaaaaaa

SEQ ID NO: 682 - DNA, 84 bp, synthetic construct
  misc_feature 1..84: note = Description of sequence: Primer
  source 1..84: mol_type = other DNA
atggacgacgacgacaagatgatcgctcgtttcaaaatgttctaacgaagcacctcgctaaaaaaaaaaaaaaaaaaaaaaaaa

SEQ ID NO: 683 - DNA, 84 bp, synthetic construct
  misc_feature 1..84: note = Description of sequence: Primer
  source 1..84: mol_type = other DNA
atggacgacgacgacaagaccctgaaaaaaatgcgtgaaatctaacgaagcacctcgctaaaaaaaaaaaaaaaaaaaaaaaaa

SEQ ID NO: 684 - DNA, 90 bp, synthetic construct
  misc_feature 1..90: note = Description of sequence: Primer
  source 1..90: mol_type = other DNA
atggacgacgacgacaaggaagctaaacagaaaggtttcgttccgttctaacgaagcacctcgctaaaaaaaaaaaaaaaaaaaaaaaaa

SEQ ID NO: 685 - DNA, 87 bp, synthetic construct
  misc_feature 1..87: note = Description of sequence: Primer
  source 1..87: mol_type = other DNA
atggacgacgacgacaagcgtatgatggaatacggtaccaccatgtaacgaagcacctcgctaaaaaaaaaaaaaaaaaaaaaaaaa

SEQ ID NO: 686 - DNA, 90 bp, synthetic construct
  misc_feature 1..90: note = Description of sequence: Primer
  source 1..90: mol_type = other DNA
atggacgacgacgacaaggaagttaaagaaaaaggtatggctgctctgtaacgaagcacctcgctaaaaaaaaaaaaaaaaaaaaaaaaa

SEQ ID NO: 687 - DNA, 87 bp, synthetic construct
  misc_feature 1..87: note = Description of sequence: Primer
  source 1..87: mol_type = other DNA
atggacgacgacgacaaggaagttaaagaaaaaggtatggctgcttaacgaagcacctcgctaaaaaaaaaaaaaaaaaaaaaaaaa

SEQ ID NO: 688 - DNA, 90 bp, synthetic construct
  misc_feature 1..90: note = Description of sequence: Primer
  source 1..90: mol_type = other DNA
atggacgacgacgacaagtacgctatgatgatcgctcgtttcaaaatgtaacgaagcacctcgctaaaaaaaaaaaaaaaaaaaaaaaaa

SEQ ID NO: 689 - DNA, 90 bp, synthetic construct
  misc_feature 1..90: note = Description of sequence: Primer
  source 1..90: mol_type = other DNA
atggacgacgacgacaagaacccgcacaaaatgatgggtgttccgctgtaacgaagcacctcgctaaaaaaaaaaaaaaaaaaaaaaaaa

SEQ ID NO: 690 - DNA, 84 bp, synthetic construct
  misc_feature 1..84: note = Description of sequence: Primer
  source 1..84: mol_type = other DNA
atggacgacgacgacaagtctcgtaaacacaaatggaaactgtaacgaagcacctcgctaaaaaaaaaaaaaaaaaaaaaaaaa

SEQ ID NO: 691 - DNA, 87 bp, synthetic construct
  misc_feature 1..87: note = Description of sequence: Primer
  source 1..87: mol_type = other DNA
atggacgacgacgacaagttccagcaggacaaacactacgacctgtaacgaagcacctcgctaaaaaaaaaaaaaaaaaaaaaaaaa

SEQ ID NO: 692 - DNA, 87 bp, synthetic construct
  misc_feature 1..87: note = Description of sequence: Primer
  source 1..87: mol_type = other DNA
atggacgacgacgacaagtacgctttcctgcacgctaccgacctgtaacgaagcacctcgctaaaaaaaaaaaaaaaaaaaaaaaaa

SEQ ID NO: 693 - DNA, 87 bp, synthetic construct
  misc_feature 1..87: note = Description of sequence: Primer
  source 1..87: mol_type = other DNA
atggacgacgacgacaagttctctctgaaaaaaggtgctgctgcttaacgaagcacctcgctaaaaaaaaaaaaaaaaaaaaaaaaa

SEQ ID NO: 694 - DNA, 84 bp, synthetic construct
  misc_feature 1..84: note = Description of sequence: Primer
  source 1..84: mol_type = other DNA
atggacgacgacgacaagtctctgaaaaaaggtgctgctgcttaacgaagcacctcgctaaaaaaaaaaaaaaaaaaaaaaaaa

SEQ ID NO: 695 - DNA, 87 bp, synthetic construct
  misc_feature 1..87: note = Description of sequence: Primer
  source 1..87: mol_type = other DNA
atggacgacgacgacaagaccctgaaaaaaatgcgtgaaatcatctaacgaagcacctcgctaaaaaaaaaaaaaaaaaaaaaaaaa

SEQ ID NO: 696 - DNA, 87 bp, synthetic construct
  misc_feature 1..87: note = Description of sequence: Primer
  source 1..87: mol_type = other DNA
atggacgacgacgacaaggaacgtatgtctcgtctgtctaaagtttaacgaagcacctcgctaaaaaaaaaaaaaaaaaaaaaaaaa

SEQ ID NO: 697 - DNA, 87 bp, synthetic construct
  misc_feature 1..87: note = Description of sequence: Primer
  source 1..87: mol_type = other DNA
atggacgacgacgacaagtacgctaaatggaaactgtgctctgcttaacgaagcacctcgctaaaaaaaaaaaaaaaaaaaaaaaaa

SEQ ID NO: 698 - DNA, 87 bp, synthetic construct
  misc_feature 1..87: note = Description of sequence: Primer
  source 1..87: mol_type = other DNA
atggacgacgacgacaaggctgctaaaatgtacgctttcaccctgtaacgaagcacctcgctaaaaaaaaaaaaaaaaaaaaaaaaa

SEQ ID NO: 699 - DNA, 87 bp, synthetic construct
  misc_feature 1..87: note = Description of sequence: Primer
  source 1..87: mol_type = other DNA
atggacgacgacgacaagtgcccgcgtgaacgtccggaagaactgtaacgaagcacctcgctaaaaaaaaaaaaaaaaaaaaaaaaa

SEQ ID NO: 700 - DNA, 84 bp, synthetic construct
  misc_feature 1..84: note = Description of sequence: Primer
  source 1..84: mol_type = other DNA
atggacgacgacgacaagtacgcttacgctaaatggaaactgtaacgaagcacctcgctaaaaaaaaaaaaaaaaaaaaaaaaa

SEQ ID NO: 701 - DNA, 84 bp, synthetic construct
  misc_feature 1..84: note = Description of sequence: Primer
  source 1..84: mol_type = other DNA
atggacgacgacgacaagttcctgctgtctctgttctctctgtaacgaagcacctcgctaaaaaaaaaaaaaaaaaaaaaaaaa

SEQ ID NO: 702 - DNA, 90 bp, synthetic construct
  misc_feature 1..90: note = Description of sequence: Primer
  source 1..90: mol_type = other DNA
atggacgacgacgacaagtctgttcgtgctgctttcgttcacgctctgtaacgaagcacctcgctaaaaaaaaaaaaaaaaaaaaaaaaa

SEQ ID NO: 703 - DNA, 84 bp, synthetic construct
  misc_feature 1..84: note = Description of sequence: Primer
  source 1..84: mol_type = other DNA
atggacgacgacgacaagaacgcttctgttcgtgctgctttctaacgaagcacctcgctaaaaaaaaaaaaaaaaaaaaaaaaa

SEQ ID NO: 704 - DNA, 84 bp, synthetic construct
  misc_feature 1..84: note = Description of sequence: Primer
  source 1..84: mol_type = other DNA
atggacgacgacgacaagcactctctgcacatctggtctctgtaacgaagcacctcgctaaaaaaaaaaaaaaaaaaaaaaaaa

SEQ ID NO: 705 - DNA, 84 bp, synthetic construct
  misc_feature 1..84: note = Description of sequence: Primer
  source 1..84: mol_type = other DNA
atggacgacgacgacaaggaagttctgaaacgtgaaccgctgtaacgaagcacctcgctaaaaaaaaaaaaaaaaaaaaaaaaa

SEQ ID NO: 706 - DNA, 87 bp, synthetic construct
  misc_feature 1..87: note = Description of sequence: Primer
  source 1..87: mol_type = other DNA
atggacgacgacgacaagctgaaccacctgaaagctaccccgatctaacgaagcacctcgctaaaaaaaaaaaaaaaaaaaaaaaaa

SEQ ID NO: 707 - DNA, 84 bp, synthetic construct
  misc_feature 1..84: note = Description of sequence: Primer
  source 1..84: mol_type = other DNA
atggacgacgacgacaagatcctgaaactgcaggttttcctgtaacgaagcacctcgctaaaaaaaaaaaaaaaaaaaaaaaaa

SEQ ID NO: 708 - DNA, 87 bp, synthetic construct
  misc_feature 1..87: note = Description of sequence: Primer
  source 1..87: mol_type = other DNA
atggacgacgacgacaagatgggtatcctgaaactgcaggttttctaacgaagcacctcgctaaaaaaaaaaaaaaaaaaaaaaaaa

SEQ ID NO: 709 - DNA, 90 bp, synthetic construct
  misc_feature 1..90: note = Description of sequence: Primer
  source 1..90: mol_type = other DNA
atggacgacgacgacaagatgggtatcctgaaactgcaggttttcctgtaacgaagcacctcgctaaaaaaaaaaaaaaaaaaaaaaaaa

SEQ ID NO: 710 - DNA, 87 bp, synthetic construct
  misc_feature 1..87: note = Description of sequence: Primer
  source 1..87: mol_type = other DNA
atggacgacgacgacaagaacacctacggtaaacgtaacgctgtttaacgaagcacctcgctaaaaaaaaaaaaaaaaaaaaaaaaa

SEQ ID NO: 711 - DNA, 84 bp, synthetic construct
  misc_feature 1..84: note = Description of sequence: Primer
  source 1..84: mol_type = other DNA
atggacgacgacgacaagttcctgcaccgtaacggtgttctgtaacgaagcacctcgctaaaaaaaaaaaaaaaaaaaaaaaaa

SEQ ID NO: 712 - DNA, 84 bp, synthetic construct
  misc_feature 1..84: note = Description of sequence: Primer
  source 1..84: mol_type = other DNA
atggacgacgacgacaagtacctgaaaaccaacctgttcctgtaacgaagcacctcgctaaaaaaaaaaaaaaaaaaaaaaaaa

SEQ ID NO: 713 - DNA, 84 bp, synthetic construct
  misc_feature 1..84: note = Description of sequence: Primer
  source 1..84: mol_type = other DNA
atggacgacgacgacaagaacctgatcttcaaatggatcctgtaacgaagcacctcgctaaaaaaaaaaaaaaaaaaaaaaaaa

SEQ ID NO: 714 - DNA, 84 bp, synthetic construct
  misc_feature 1..84: note = Description of sequence: Primer
  source 1..84: mol_type = other DNA
atggacgacgacgacaagtacgttatggttaccgctgctctgtaacgaagcacctcgctaaaaaaaaaaaaaaaaaaaaaaaaa

SEQ ID NO: 715 - DNA, 90 bp, synthetic construct
  misc_feature 1..90: note = Description of sequence: Primer
  source 1..90: mol_type = other DNA
atggacgacgacgacaagaccctgtctttccgtctgctgtgcgctctgtaacgaagcacctcgctaaaaaaaaaaaaaaaaaaaaaaaaa

SEQ ID NO: 716 - DNA, 90 bp, synthetic construct
  misc_feature 1..90: note = Description of sequence: Primer
  source 1..90: mol_type = other DNA
atggacgacgacgacaagtacctgaaaaccaacctgttcctgttcctgtaacgaagcacctcgctaaaaaaaaaaaaaaaaaaaaaaaaa

SEQ ID NO: 717 - DNA, 87 bp, synthetic construct
  misc_feature 1..87: note = Description of sequence: Primer
  source 1..87: mol_type = other DNA
atggacgacgacgacaagtacctgaaaaccaacctgttcctgttctaacgaagcacctcgctaaaaaaaaaaaaaaaaaaaaaaaaa

SEQ ID NO: 718 - DNA, 84 bp, synthetic construct
  misc_feature 1..84: note = Description of sequence: Primer
  source 1..84: mol_type = other DNA
atggacgacgacgacaagtctttccgtctgctgtgcgctctgtaacgaagcacctcgctaaaaaaaaaaaaaaaaaaaaaaaaa

SEQ ID NO: 719 - DNA, 87 bp, synthetic construct
  misc_feature 1..87: note = Description of sequence: Primer
  source 1..87: mol_type = other DNA
atggacgacgacgacaagaccctgcaccgtctgacctggtctttctaacgaagcacctcgctaaaaaaaaaaaaaaaaaaaaaaaaa

SEQ ID NO: 720 - DNA, 90 bp, synthetic construct
  misc_feature 1..90: note = Description of sequence: Primer
  source 1..90: mol_type = other DNA
atggacgacgacgacaagtgcggtatggacaaattctctatcaccctgtaacgaagcacctcgctaaaaaaaaaaaaaaaaaaaaaaaaa

SEQ ID NO: 721 - DNA, 84 bp, synthetic construct
  misc_feature 1..84: note = Description of sequence: Primer
  source 1..84: mol_type = other DNA
atggacgacgacgacaagtgcggtatggacaaattctctatctaacgaagcacctcgctaaaaaaaaaaaaaaaaaaaaaaaaa

SEQ ID NO: 722 - DNA, 87 bp, synthetic construct
  misc_feature 1..87: note = Description of sequence: Primer
  source 1..87: mol_type = other DNA
atggacgacgacgacaagaacctgatcttcaaatggaaatctatctaacgaagcacctcgctaaaaaaaaaaaaaaaaaaaaaaaaa

SEQ ID NO: 723 - DNA, 90 bp, synthetic construct
  misc_feature 1..90: note = Description of sequence: Primer
  source 1..90: mol_type = other DNA
atggacgacgacgacaagtggccgtgcaacggtcgtatcctgtgcctgtaacgaagcacctcgctaaaaaaaaaaaaaaaaaaaaaaaaa

SEQ ID NO: 724 - DNA, 87 bp, synthetic construct
  misc_feature 1..87: note = Description of sequence: Primer
  source 1..87: mol_type = other DNA
atggacgacgacgacaaggttctgctggaaaaaaaatctccgctgtaacgaagcacctcgctaaaaaaaaaaaaaaaaaaaaaaaaa

SEQ ID NO: 725 - DNA, 84 bp, synthetic construct
  misc_feature 1..84: note = Description of sequence: Primer
  source 1..84: mol_type = other DNA
atggacgacgacgacaagttcctggttcgttctttctacctgtaacgaagcacctcgctaaaaaaaaaaaaaaaaaaaaaaaaa

SEQ ID NO: 726 - DNA, 84 bp, synthetic construct
  misc_feature 1..84: note = Description of sequence: Primer
  source 1..84: mol_type = other DNA
atggacgacgacgacaagcacctgcgtaaccgtgaccgtctgtaacgaagcacctcgctaaaaaaaaaaaaaaaaaaaaaaaaa

SEQ ID NO: 727 - DNA, 84 bp, synthetic construct
  misc_feature 1..84: note = Description of sequence: Primer
  source 1..84: mol_type = other DNA
atggacgacgacgacaagtctccgatgcgttctgttctgctgtaacgaagcacctcgctaaaaaaaaaaaaaaaaaaaaaaaaa

SEQ ID NO: 728 - DNA, 87 bp, synthetic construct
  misc_feature 1..87: note = Description of sequence: Primer
  source 1..87: mol_type = other DNA
atggacgacgacgacaaggctgctctgcagcgtctggctgctgtttaacgaagcacctcgctaaaaaaaaaaaaaaaaaaaaaaaaa

SEQ ID NO: 729 - DNA, 84 bp, synthetic construct
  misc_feature 1..84: note = Description of sequence: Primer
  source 1..84: mol_type = other DNA
atggacgacgacgacaagctgccggctcgtacctctccgatgtaacgaagcacctcgctaaaaaaaaaaaaaaaaaaaaaaaaa

SEQ ID NO: 730 - DNA, 84 bp, synthetic construct
  misc_feature 1..84: note = Description of sequence: Primer
  source 1..84: mol_type = other DNA
atggacgacgacgacaagctgctggaaaaaaaatctccgctgtaacgaagcacctcgctaaaaaaaaaaaaaaaaaaaaaaaaa

SEQ ID NO: 731 - DNA, 84 bp, synthetic construct
  misc_feature 1..84: note = Description of sequence: Primer
  source 1..84: mol_type = other DNA
atggacgacgacgacaaggacaaagaacgtctggctgctctgtaacgaagcacctcgctaaaaaaaaaaaaaaaaaaaaaaaaa

SEQ ID NO: 732 - DNA, 84 bp, synthetic construct
  misc_feature 1..84: note = Description of sequence: Primer
  source 1..84: mol_type = other DNA
atggacgacgacgacaagcacgctcgtatcaaactgaaagtttaacgaagcacctcgctaaaaaaaaaaaaaaaaaaaaaaaaa

SEQ ID NO: 733 - DNA, 84 bp, synthetic construct
  misc_feature 1..84: note = Description of sequence: Primer
  source 1..84: mol_type = other DNA
atggacgacgacgacaagtaccgtggtcgttcttgcccgatctaacgaagcacctcgctaaaaaaaaaaaaaaaaaaaaaaaaa

SEQ ID NO: 734 - DNA, 90 bp, synthetic construct
  misc_feature 1..90: note = Description of sequence: Primer
  source 1..90: mol_type = other DNA
atggacgacgacgacaagcagcaggacaaagaacgtctggctgctctgtaacgaagcacctcgctaaaaaaaaaaaaaaaaaaaaaaaaa

SEQ ID NO: 735 - DNA, 87 bp, synthetic construct
  misc_feature 1..87: note = Description of sequence: Primer
  source 1..87: mol_type = other DNA
atggacgacgacgacaaggaactgccggctcgtacctctccgatgtaacgaagcacctcgctaaaaaaaaaaaaaaaaaaaaaaaaa

SEQ ID NO: 736 - DNA, 87 bp, synthetic construct
  misc_feature 1..87: note = Description of sequence: Primer
  source 1..87: mol_type = other DNA
atggacgacgacgacaagtgctaccgtggtcgttcttgcccgatctaacgaagcacctcgctaaaaaaaaaaaaaaaaaaaaaaaaa

SEQ ID NO: 737 - DNA, 84 bp, synthetic construct
  misc_feature 1..84: note = Description of sequence: Primer
  source 1..84: mol_type = other DNA
atggacgacgacgacaagcgtccgcgtgaccgttctggtctgtaacgaagcacctcgctaaaaaaaaaaaaaaaaaaaaaaaaa

SEQ ID NO: 738 - DNA, 90 bp, synthetic construct
  misc_feature 1..90: note = Description of sequence: Primer
  source 1..90: mol_type = other DNA
atggacgacgacgacaagtctccgatgcgttctgttctgctgaccctgtaacgaagcacctcgctaaaaaaaaaaaaaaaaaaaaaaaaa

SEQ ID NO: 739 - DNA, 84 bp, synthetic construct
  misc_feature 1..84: note = Description of sequence: Primer
  source 1..84: mol_type = other DNA
atggacgacgacgacaaggctctgcagcgtctggctgctgtttaacgaagcacctcgctaaaaaaaaaaaaaaaaaaaaaaaaa

SEQ ID NO: 740 - DNA, 90 bp, synthetic construct
  misc_feature 1..90: note = Description of sequence: Primer
  source 1..90: mol_type = other DNA
atggacgacgacgacaaggctgctctgcagcgtctggctgctgttctgtaacgaagcacctcgctaaaaaaaaaaaaaaaaaaaaaaaaa

SEQ ID NO: 741 - DNA, 87 bp, synthetic construct
  misc_feature 1..87: note = Description of sequence: Primer
  source 1..87: mol_type = other DNA
atggacgacgacgacaagcacctgcgtaaccgtgaccgtctggcttaacgaagcacctcgctaaaaaaaaaaaaaaaaaaaaaaaaa

SEQ ID NO: 742 - DNA, 84 bp, synthetic construct
  misc_feature 1..84: note = Description of sequence: Primer
  source 1..84: mol_type = other DNA
atggacgacgacgacaagctggctaaagaatggcaggctctgtaacgaagcacctcgctaaaaaaaaaaaaaaaaaaaaaaaaa

SEQ ID NO: 743 - DNA, 87 bp, synthetic construct
  misc_feature 1..87: note = Description of sequence: Primer
  source 1..87: mol_type = other DNA
atggacgacgacgacaagcaggacaaagaacgtctggctgctctgtaacgaagcacctcgctaaaaaaaaaaaaaaaaaaaaaaaaa

SEQ ID NO: 744 - DNA, 87 bp, synthetic construct
  misc_feature 1..87: note = Description of sequence: Primer
  source 1..87: mol_type = other DNA
atggacgacgacgacaagaacctgcagatccgtgaaacctctctgtaacgaagcacctcgctaaaaaaaaaaaaaaaaaaaaaaaaa

SEQ ID NO: 745 - DNA, 84 bp, synthetic construct
  misc_feature 1..84: note = Description of sequence: Primer
  source 1..84: mol_type = other DNA
atggacgacgacgacaagctgctgaacgttaaactggctctgtaacgaagcacctcgctaaaaaaaaaaaaaaaaaaaaaaaaa

SEQ ID NO: 746 - DNA, 87 bp, synthetic construct
  misc_feature 1..87: note = Description of sequence: Primer
  source 1..87: mol_type = other DNA
atggacgacgacgacaaggaactgcgtctgcgtctggaccagctgtaacgaagcacctcgctaaaaaaaaaaaaaaaaaaaaaaaaa

SEQ ID NO: 747 - DNA, 87 bp, synthetic construct
  misc_feature 1..87: note = Description of sequence: Primer
  source 1..87: mol_type = other DNA
atggacgacgacgacaagatggaacgtcgtcgtatcacctctgcttaacgaagcacctcgctaaaaaaaaaaaaaaaaaaaaaaaaa

SEQ ID NO: 748 - DNA, 87 bp, synthetic construct
  misc_feature 1..87: note = Description of sequence: Primer
  source 1..87: mol_type = other DNA
atggacgacgacgacaagtggtaccgttctaaattcgctgacctgtaacgaagcacctcgctaaaaaaaaaaaaaaaaaaaaaaaaa

SEQ ID NO: 749 - DNA, 84 bp, synthetic construct
  misc_feature 1..84: note = Description of sequence: Primer
  source 1..84: mol_type = other DNA
atggacgacgacgacaagcacctgaaacgtaacatcgttgtttaacgaagcacctcgctaaaaaaaaaaaaaaaaaaaaaaaaa

SEQ ID NO: 750 - DNA, 84 bp, synthetic construct
  misc_feature 1..84: note = Description of sequence: Primer
  source 1..84: mol_type = other DNA
atggacgacgacgacaagtaccgtcgtcagctgcagtctctgtaacgaagcacctcgctaaaaaaaaaaaaaaaaaaaaaaaaa

SEQ ID NO: 751 - DNA, 84 bp, synthetic construct
  misc_feature 1..84: note = Description of sequence: Primer
  source 1..84: mol_type = other DNA
atggacgacgacgacaagtaccgttctaaattcgctgacctgtaacgaagcacctcgctaaaaaaaaaaaaaaaaaaaaaaaaa

SEQ ID NO: 752 - DNA, 90 bp, synthetic construct
  misc_feature 1..90: note = Description of sequence: Primer
  source 1..90: mol_type = other DNA
atggacgacgacgacaagtctaacctgcagatccgtgaaacctctctgtaacgaagcacctcgctaaaaaaaaaaaaaaaaaaaaaaaaa

SEQ ID NO: 753 - DNA, 87 bp, synthetic construct
  misc_feature 1..87: note = Description of sequence: Primer
  source 1..87: mol_type = other DNA
atggacgacgacgacaaggaactgcgtgaactgcgtctgcgtctgtaacgaagcacctcgctaaaaaaaaaaaaaaaaaaaaaaaaa

SEQ ID NO: 754 - DNA, 87 bp, synthetic construct
  misc_feature 1..87: note = Description of sequence: Primer
  source 1..87: mol_type = other DNA
atggacgacgacgacaaggactaccgtcgtcagctgcagtctctgtaacgaagcacctcgctaaaaaaaaaaaaaaaaaaaaaaaaa

SEQ ID NO: 755 - DNA, 84 bp, synthetic construct
  misc_feature 1..84: note = Description of sequence: Primer
  source 1..84: mol_type = other DNA
atggacgacgacgacaagtctgctgctcgtcgttcttacgtttaacgaagcacctcgctaaaaaaaaaaaaaaaaaaaaaaaaa

SEQ ID NO: 756 - DNA, 87 bp, synthetic construct
  misc_feature 1..87: note = Description of sequence: Primer
  source 1..87: mol_type = other DNA
atggacgacgacgacaaggaaggtcacctgaaacgtaacatcgtttaacgaagcacctcgctaaaaaaaaaaaaaaaaaaaaaaaaa

SEQ ID NO: 757 - DNA, 90 bp, synthetic construct
  misc_feature 1..90: note = Description of sequence: Primer
  source 1..90: mol_type = other DNA
atggacgacgacgacaagatggaacgtcgtcgtatcacctctgctgcttaacgaagcacctcgctaaaaaaaaaaaaaaaaaaaaaaaaa

SEQ ID NO: 758 - DNA, 84 bp, synthetic construct
  misc_feature 1..84: note = Description of sequence: Primer
  source 1..84: mol_type = other DNA
atggacgacgacgacaagctgcgtctgcgtctggaccagctgtaacgaagcacctcgctaaaaaaaaaaaaaaaaaaaaaaaaa

SEQ ID NO: 759 - DNA, 87 bp, synthetic construct
  misc_feature 1..87: note = Description of sequence: Primer
  source 1..87: mol_type = other DNA
atggacgacgacgacaaggacctggaacgtaaaatcgaatctctgtaacgaagcacctcgctaaaaaaaaaaaaaaaaaaaaaaaaa

SEQ ID NO: 760 - DNA, 84 bp, synthetic construct
  misc_feature 1..84: note = Description of sequence: Primer
  source 1..84: mol_type = other DNA
atggacgacgacgacaagctgcagatccgtgaaacctctctgtaacgaagcacctcgctaaaaaaaaaaaaaaaaaaaaaaaaa

SEQ ID NO: 761 - DNA, 90 bp, synthetic construct
  misc_feature 1..90: note = Description of sequence: Primer
  source 1..90: mol_type = other DNA
atggacgacgacgacaagcgtgaactgcgtctgcgtctggaccagctgtaacgaagcacctcgctaaaaaaaaaaaaaaaaaaaaaaaaa

SEQ ID NO: 762 - DNA, 84 bp, synthetic construct
  misc_feature 1..84: note = Description of sequence: Primer
  source 1..84: mol_type = other DNA
atggacgacgacgacaagctggctcgtatgccgccgccgctgtaacgaagcacctcgctaaaaaaaaaaaaaaaaaaaaaaaaa

SEQ ID NO: 763 - DNA, 87 bp, synthetic construct
  misc_feature 1..87: note = Description of sequence: Primer
  source 1..87: mol_type = other DNA
atggacgacgacgacaaggaaatccgtacccagtacgaagctatgtaacgaagcacctcgctaaaaaaaaaaaaaaaaaaaaaaaaa

SEQ ID NO: 764 - DNA, 84 bp, synthetic construct
  misc_feature 1..84: note = Description of sequence: Primer
  source 1..84: mol_type = other DNA
atggacgacgacgacaagggtccgggtacccgtctgtctctgtaacgaagcacctcgctaaaaaaaaaaaaaaaaaaaaaaaaa

SEQ ID NO: 765 - DNA, 87 bp, synthetic construct
  misc_feature 1..87: note = Description of sequence: Primer
  source 1..87: mol_type = other DNA
atggacgacgacgacaaggctgaccgtggtctgctgcgtgacatctaacgaagcacctcgctaaaaaaaaaaaaaaaaaaaaaaaaa

SEQ ID NO: 766 - DNA, 87 bp, synthetic construct
  misc_feature 1..87: note = Description of sequence: Primer
  source 1..87: mol_type = other DNA
atggacgacgacgacaaggctctgaaatgcaaaggtttccacgtttaacgaagcacctcgctaaaaaaaaaaaaaaaaaaaaaaaaa

SEQ ID NO: 767 - DNA, 87 bp, synthetic construct
  misc_feature 1..87: note = Description of sequence: Primer
  source 1..87: mol_type = other DNA
atggacgacgacgacaaggaactgcgttctcgttactgggctatctaacgaagcacctcgctaaaaaaaaaaaaaaaaaaaaaaaaa

SEQ ID NO: 768 - DNA, 87 bp, synthetic construct
  misc_feature 1..87: note = Description of sequence: Primer
  source 1..87: mol_type = other DNA
atggacgacgacgacaagatcctgaaaggtaaattccagaccgcttaacgaagcacctcgctaaaaaaaaaaaaaaaaaaaaaaaaa

SEQ ID NO: 769 - DNA, 87 bp, synthetic construct
  misc_feature 1..87: note = Description of sequence: Primer
  source 1..87: mol_type = other DNA
atggacgacgacgacaagcgtccgatcatccgtccggctaccctgtaacgaagcacctcgctaaaaaaaaaaaaaaaaaaaaaaaaa

SEQ ID NO: 770 - DNA, 87 bp, synthetic construct
  misc_feature 1..87: note = Description of sequence: Primer
  source 1..87: mol_type = other DNA
atggacgacgacgacaaggaactgcgttctctgtacaacaccgtttaacgaagcacctcgctaaaaaaaaaaaaaaaaaaaaaaaaa

SEQ ID NO: 771 - DNA, 84 bp, synthetic construct
  misc_feature 1..84: note = Description of sequence: Primer
  source 1..84: mol_type = other DNA
atggacgacgacgacaaggaaatctacaaacgttggatcatctaacgaagcacctcgctaaaaaaaaaaaaaaaaaaaaaaaaa

SEQ ID NO: 772 - DNA, 87 bp, synthetic construct
  misc_feature 1..87: note = Description of sequence: Primer
  source 1..87: mol_type = other DNA
atggacgacgacgacaagcgtgttaaagaaaaataccagcacctgtaacgaagcacctcgctaaaaaaaaaaaaaaaaaaaaaaaaa

SEQ ID NO: 773 - DNA, 84 bp, synthetic construct
  misc_feature 1..84: note = Description of sequence: Primer
  source 1..84: mol_type = other DNA
atggacgacgacgacaagtacctgaaagaccagcagctgctgtaacgaagcacctcgctaaaaaaaaaaaaaaaaaaaaaaaaa

SEQ ID NO: 774 - DNA, 84 bp, synthetic construct
  misc_feature 1..84: note = Description of sequence: Primer
  source 1..84: mol_type = other DNA
atggacgacgacgacaagtggccgaccgttcgtgaacgtatgtaacgaagcacctcgctaaaaaaaaaaaaaaaaaaaaaaaaa

SEQ ID NO: 775 - DNA, 84 bp, synthetic construct
  misc_feature 1..84: note = Description of sequence: Primer
  source 1..84: mol_type = other DNA
atggacgacgacgacaagttcctgaaagaaaaaggtggtctgtaacgaagcacctcgctaaaaaaaaaaaaaaaaaaaaaaaaa

SEQ ID NO: 776 - DNA, 87 bp, synthetic construct
  misc_feature 1..87: note = Description of sequence: Primer
  source 1..87: mol_type = other DNA
atggacgacgacgacaagggtccgaaagttaaacagtggccgctgtaacgaagcacctcgctaaaaaaaaaaaaaaaaaaaaaaaaa

SEQ ID NO: 777 - DNA, 87 bp, synthetic construct
  misc_feature 1..87: note = Description of sequence: Primer
  source 1..87: mol_type = other DNA
atggacgacgacgacaagttcctgcgtggtcgtgcttacggtctgtaacgaagcacctcgctaaaaaaaaaaaaaaaaaaaaaaaaa

SEQ ID NO: 778 - DNA, 84 bp, synthetic construct
  misc_feature 1..84: note = Description of sequence: Primer
  source 1..84: mol_type = other DNA
atggacgacgacgacaagcgtgctaaattcaaacagctgctgtaacgaagcacctcgctaaaaaaaaaaaaaaaaaaaaaaaaa

SEQ ID NO: 779 - DNA, 87 bp, synthetic construct
  misc_feature 1..87: note = Description of sequence: Primer
  source 1..87: mol_type = other DNA
atggacgacgacgacaagcaggctaaatggcgtctgcagaccctgtaacgaagcacctcgctaaaaaaaaaaaaaaaaaaaaaaaaa

SEQ ID NO: 780 - DNA, 84 bp, synthetic construct
  misc_feature 1..84: note = Description of sequence: Primer
  source 1..84: mol_type = other DNA
atggacgacgacgacaagtgcccgctgtctaaaatcctgctgtaacgaagcacctcgctaaaaaaaaaaaaaaaaaaaaaaaaa

SEQ ID NO: 781 - DNA, 59 bp, synthetic construct
  misc_feature 1..59: note = Description of sequence: Primer
  source 1..59: mol_type = other DNA
atggacgacgacgacaagtggtccgtcacgcaataaaaaaaaaaaaaaaaaaaaaaaaa

SEQ ID NO: 782 - DNA, 59 bp, synthetic construct
  misc_feature 1..59: note = Description of sequence: Primer
  source 1..59: mol_type = other DNA
atggacgacgacgacaagaggtgattgtgggataaaaaaaaaaaaaaaaaaaaaaaaaa

SEQ ID NO: 783 - DNA, 59 bp, synthetic construct
  misc_feature 1..59: note = Description of sequence: Primer
  source 1..59: mol_type = other DNA
atggacgacgacgacaagagcggcgttgatacttaaaaaaaaaaaaaaaaaaaaaaaaa

SEQ ID NO: 784 - DNA, 59 bp, synthetic construct
  misc_feature 1..59: note = Description of sequence: Primer
  source 1..59: mol_type = other DNA
atggacgacgacgacaagtaggtcgcgcttgcttaaaaaaaaaaaaaaaaaaaaaaaaa

SEQ ID NO: 785 - DNA, 59 bp, synthetic construct
  misc_feature 1..59: note = Description of sequence: Primer
  source 1..59: mol_type = other DNA
atggacgacgacgacaagtgttgcaggttgctgtaaaaaaaaaaaaaaaaaaaaaaaaa

SEQ ID NO: 786 - DNA, 59 bp, synthetic construct
  misc_feature 1..59: note = Description of sequence: Primer
  source 1..59: mol_type = other DNA
atggacgacgacgacaaggatgtgagttatgcagaaaaaaaaaaaaaaaaaaaaaaaaa

SEQ ID NO: 787 - DNA, 59 bp, synthetic construct
  misc_feature 1..59: note = Description of sequence: Primer
  source 1..59: mol_type = other DNA
atggacgacgacgacaagaggtatcgcagtctggaaaaaaaaaaaaaaaaaaaaaaaaa

SEQ ID NO: 788 - DNA, 59 bp, synthetic construct
  misc_feature 1..59: note = Description of sequence: Primer
  source 1..59: mol_type = other DNA
atggacgacgacgacaagtataatgggcgtctctaaaaaaaaaaaaaaaaaaaaaaaaa

SEQ ID NO: 789 - DNA, 59 bp, synthetic construct
  misc_feature 1..59: note = Description of sequence: Primer
  source 1..59: mol_type = other DNA
atggacgacgacgacaagttcggcctggtgtaacaaaaaaaaaaaaaaaaaaaaaaaaa

SEQ ID NO: 790 - DNA, 59 bp, synthetic construct
  misc_feature 1..59: note = Description of sequence: Primer
  source 1..59: mol_type = other DNA
atggacgacgacgacaagcctacgtatcgaagttaaaaaaaaaaaaaaaaaaaaaaaaa

SEQ ID NO: 791 - DNA, 59 bp, synthetic construct
  misc_feature 1..59: note = Description of sequence: Primer
  source 1..59: mol_type = other DNA
atggacgacgacgacaagtctgccttgtatccgcaaaaaaaaaaaaaaaaaaaaaaaaa

SEQ ID NO: 792 - DNA, 59 bp, synthetic construct
  misc_feature 1..59: note = Description of sequence: Primer
  source 1..59: mol_type = other DNA
atggacgacgacgacaagtgttgaccttcctcttaaaaaaaaaaaaaaaaaaaaaaaaa

SEQ ID NO: 793 - DNA, 59 bp, synthetic construct
  misc_feature 1..59: note = Description of sequence: Primer
  source 1..59: mol_type = other DNA
atggacgacgacgacaagcctcatgcagtattgaaaaaaaaaaaaaaaaaaaaaaaaaa

SEQ ID NO: 794 - DNA, 59 bp, synthetic construct
  misc_feature 1..59: note = Description of sequence: Primer
  source 1..59: mol_type = other DNA
atggacgacgacgacaagagtcatccacgcactcaaaaaaaaaaaaaaaaaaaaaaaaa

SEQ ID NO: 795 - DNA, 59 bp, synthetic construct
  misc_feature 1..59: note = Description of sequence: Primer
  source 1..59: mol_type = other DNA
atggacgacgacgacaagaggttgtcgaattcccaaaaaaaaaaaaaaaaaaaaaaaaa

SEQ ID NO: 796 - DNA, 59 bp, synthetic construct
  misc_feature 1..59: note = Description of sequence: Primer
  source 1..59: mol_type = other DNA
atggacgacgacgacaagtgcagaaaggtcatctaaaaaaaaaaaaaaaaaaaaaaaaa

SEQ ID NO: 797 - DNA, 59 bp, synthetic construct
  misc_feature 1..59: note = Description of sequence: Primer
  source 1..59: mol_type = other DNA
atggacgacgacgacaagatttccggatcaatgcaaaaaaaaaaaaaaaaaaaaaaaaa

SEQ ID NO: 798 - DNA, 59 bp, synthetic construct
  misc_feature 1..59: note = Description of sequence: Primer
  source 1..59: mol_type = other DNA
atggacgacgacgacaaggaatccgtactgattgaaaaaaaaaaaaaaaaaaaaaaaaa

SEQ ID NO: 799 - DNA, 59 bp, synthetic construct
  misc_feature 1..59: note = Description of sequence: Primer
  source 1..59: mol_type = other DNA
atggacgacgacgacaagagagcgcagacattgcaaaaaaaaaaaaaaaaaaaaaaaaa

SEQ ID NO: 800 - DNA, 59 bp, synthetic construct
  misc_feature 1..59: note = Description of sequence: Primer
  source 1..59: mol_type = other DNA
atggacgacgacgacaagtgtatgtctaccgagaaaaaaaaaaaaaaaaaaaaaaaaaa

SEQ ID NO: 801 - DNA, 59 bp, synthetic construct
  misc_feature 1..59: note = Description of sequence: Primer
  source 1..59: mol_type = other DNA
atggacgacgacgacaagtgcttcctacgttcgtaaaaaaaaaaaaaaaaaaaaaaaaa

SEQ ID NO: 802 - DNA, 59 bp, synthetic construct
  misc_feature 1..59: note = Description of sequence: Primer
  source 1..59: mol_type = other DNA
atggacgacgacgacaagtagtggggtaaaccataaaaaaaaaaaaaaaaaaaaaaaaa

SEQ ID NO: 803 - DNA, 59 bp, synthetic construct
  misc_feature 1..59: note = Description of sequence: Primer
  source 1..59: mol_type = other DNA
atggacgacgacgacaagcaaattttccatggcgaaaaaaaaaaaaaaaaaaaaaaaaa

SEQ ID NO: 804 - DNA, 59 bp, synthetic construct
  misc_feature 1..59: note = Description of sequence: Primer
  source 1..59: mol_type = other DNA
atggacgacgacgacaagaaggccttcgtttcgaaaaaaaaaaaaaaaaaaaaaaaaaa

SEQ ID NO: 805 - DNA, 59 bp, synthetic construct
  misc_feature 1..59: note = Description of sequence: Primer
  source 1..59: mol_type = other DNA
atggacgacgacgacaaggtcgagggagatatgcaaaaaaaaaaaaaaaaaaaaaaaaa

SEQ ID NO: 806 - DNA, 59 bp, synthetic construct
  misc_feature 1..59: note = Description of sequence: Primer
  source 1..59: mol_type = other DNA
atggacgacgacgacaagctggacccagacatataaaaaaaaaaaaaaaaaaaaaaaaa

SEQ ID NO: 807 - DNA, 59 bp, synthetic construct
  misc_feature 1..59: note = Description of sequence: Primer
  source 1..59: mol_type = other DNA
atggacgacgacgacaagtagtcaagcactcggcaaaaaaaaaaaaaaaaaaaaaaaaa

SEQ ID NO: 808 - DNA, 59 bp, synthetic construct
  misc_feature 1..59: note = Description of sequence: Primer
  source 1..59: mol_type = other DNA
atggacgacgacgacaagactaaggcggaaatctaaaaaaaaaaaaaaaaaaaaaaaaa

SEQ ID NO: 809 - DNA, 59 bp, synthetic construct
  misc_feature 1..59: note = Description of sequence: Primer
  source 1..59: mol_type = other DNA
atggacgacgacgacaagtttagtgccggtgataaaaaaaaaaaaaaaaaaaaaaaaaa

SEQ ID NO: 810 - DNA, 59 bp, synthetic construct
  misc_feature 1..59: note = Description of sequence: Primer
  source 1..59: mol_type = other DNA
atggacgacgacgacaagacttgcaacctaccggaaaaaaaaaaaaaaaaaaaaaaaaa

SEQ ID NO: 811 - DNA, 59 bp, synthetic construct
  misc_feature 1..59: note = Description of sequence: Primer
  source 1..59: mol_type = other DNA
atggacgacgacgacaagtctacaacggacgtgaaaaaaaaaaaaaaaaaaaaaaaaaa

SEQ ID NO: 812 - DNA, 59 bp, synthetic construct
  misc_feature 1..59: note = Description of sequence: Primer
  source 1..59: mol_type = other DNA
atggacgacgacgacaagagcaaaaccctacctaaaaaaaaaaaaaaaaaaaaaaaaaa

SEQ ID NO: 813 - DNA, 59 bp, synthetic construct
  misc_feature 1..59: note = Description of sequence: Primer
  source 1..59: mol_type = other DNA
atggacgacgacgacaagttatcatcggtatgggaaaaaaaaaaaaaaaaaaaaaaaaa

SEQ ID NO: 814 - DNA, 59 bp, synthetic construct
  misc_feature 1..59: note = Description of sequence: Primer
  source 1..59: mol_type = other DNA
atggacgacgacgacaagttctgcggatcgtcctaaaaaaaaaaaaaaaaaaaaaaaaa

SEQ ID NO: 815 - DNA, 59 bp, synthetic construct
  misc_feature 1..59: note = Description of sequence: Primer
  source 1..59: mol_type = other DNA
atggacgacgacgacaagcctgcaaaggtatagcaaaaaaaaaaaaaaaaaaaaaaaaa

SEQ ID NO: 816 - DNA, 59 bp, synthetic construct
  misc_feature 1..59: note = Description of sequence: Primer
  source 1..59: mol_type = other DNA
atggacgacgacgacaagagtactaagaagcgccaaaaaaaaaaaaaaaaaaaaaaaaa

SEQ ID NO: 817 - DNA, 59 bp, synthetic construct
  misc_feature 1..59: note = Description of sequence: Primer
  source 1..59: mol_type = other DNA
atggacgacgacgacaagttggatacttgctgagaaaaaaaaaaaaaaaaaaaaaaaaa

SEQ ID NO: 818 - DNA, 59 bp, synthetic construct
  misc_feature 1..59: note = Description of sequence: Primer
  source 1..59: mol_type = other DNA
atggacgacgacgacaaggtgtctccaaatcttcaaaaaaaaaaaaaaaaaaaaaaaaa

SEQ ID NO: 819 - DNA, 59 bp, synthetic construct
  misc_feature 1..59: note = Description of sequence: Primer
  source 1..59: mol_type = other DNA
atggacgacgacgacaaggactctattacccaccaaaaaaaaaaaaaaaaaaaaaaaaa

SEQ ID NO: 820 - DNA, 59 bp, synthetic construct
  misc_feature 1..59: note = Description of sequence: Primer
  source 1..59: mol_type = other DNA
atggacgacgacgacaagcagggattccaatatcaaaaaaaaaaaaaaaaaaaaaaaaa

SEQ ID NO: 821 - DNA, 59 bp, synthetic construct
  misc_feature 1..59: note = Description of sequence: Primer
  source 1..59: mol_type = other DNA
atggacgacgacgacaagtatgcctagacaggttaaaaaaaaaaaaaaaaaaaaaaaaa

SEQ ID NO: 822 - DNA, 59 bp, synthetic construct
  misc_feature 1..59: note = Description of sequence: Primer
  source 1..59: mol_type = other DNA
atggacgacgacgacaagagtagcattttcggtgaaaaaaaaaaaaaaaaaaaaaaaaa

SEQ ID NO: 823 - DNA, 59 bp, synthetic construct
  misc_feature 1..59: note = Description of sequence: Primer
  source 1..59: mol_type = other DNA
atggacgacgacgacaaggacgtacgattgctacaaaaaaaaaaaaaaaaaaaaaaaaa

SEQ ID NO: 824 - DNA, 59 bp, synthetic construct
  misc_feature 1..59: note = Description of sequence: Primer
  source 1..59: mol_type = other DNA
atggacgacgacgacaaggctcatgacatcgctaaaaaaaaaaaaaaaaaaaaaaaaaa

SEQ ID NO: 825 - DNA, 59 bp, synthetic construct
  misc_feature 1..59: note = Description of sequence: Primer
  source 1..59: mol_type = other DNA
atggacgacgacgacaaggccttcaattctatggaaaaaaaaaaaaaaaaaaaaaaaaa

SEQ ID NO: 826 - DNA, 59 bp, synthetic construct
  misc_feature 1..59: note = Description of sequence: Primer
  source 1..59: mol_type = other DNA
atggacgacgacgacaagctagtgttacaggtgcaaaaaaaaaaaaaaaaaaaaaaaaa

SEQ ID NO: 827 - DNA, 59 bp, synthetic construct
  misc_feature 1..59: note = Description of sequence: Primer
  source 1..59: mol_type = other DNA
atggacgacgacgacaagccgagtgctctaaccaaaaaaaaaaaaaaaaaaaaaaaaaa

SEQ ID NO: 828 - DNA, 59 bp, synthetic construct
  misc_feature 1..59: note = Description of sequence: Primer
  source 1..59: mol_type = other DNA
atggacgacgacgacaagatacgtcgtggcaacgaaaaaaaaaaaaaaaaaaaaaaaaa

SEQ ID NO: 829 - DNA, 59 bp, synthetic construct
  misc_feature 1..59: note = Description of sequence: Primer
  source 1..59: mol_type = other DNA
atggacgacgacgacaagactgaggtccgatctaaaaaaaaaaaaaaaaaaaaaaaaaa

SEQ ID NO: 830 - DNA, 59 bp, synthetic construct
  misc_feature 1..59: note = Description of sequence: Primer
  source 1..59: mol_type = other DNA
atggacgacgacgacaagttcgctcggaacatacaaaaaaaaaaaaaaaaaaaaaaaaa

SEQ ID NO: 831 - DNA, 59 bp, synthetic construct
  misc_feature 1..59: note = Description of sequence: Primer
  source 1..59: mol_type = other DNA
atggacgacgacgacaagcaactcggtagttgagaaaaaaaaaaaaaaaaaaaaaaaaa

SEQ ID NO: 832 - DNA, 59 bp, synthetic construct
  misc_feature 1..59: note = Description of sequence: Primer
  source 1..59: mol_type = other DNA
atggacgacgacgacaagtttgtttaggggttgcaaaaaaaaaaaaaaaaaaaaaaaaa

SEQ ID NO: 833 - DNA, 59 bp, synthetic construct
  misc_feature 1..59: note = Description of sequence: Primer
  source 1..59: mol_type = other DNA
atggacgacgacgacaagaagcgcatttcgttctaaaaaaaaaaaaaaaaaaaaaaaaa

SEQ ID NO: 834 - DNA, 59 bp, synthetic construct
  misc_feature 1..59: note = Description of sequence: Primer
  source 1..59: mol_type = other DNA
atggacgacgacgacaagcgagctccaactatcaaaaaaaaaaaaaaaaaaaaaaaaaa

SEQ ID NO: 835 - DNA, 59 bp, synthetic construct
  misc_feature 1..59: note = Description of sequence: Primer
  source 1..59: mol_type = other DNA
atggacgacgacgacaagaatctggacggcttgtaaaaaaaaaaaaaaaaaaaaaaaaa

SEQ ID NO: 836 - DNA, 59 bp, synthetic construct
  misc_feature 1..59: note = Description of sequence: Primer
  source 1..59: mol_type = other DNA
atggacgacgacgacaagcatttatgggtggtcaaaaaaaaaaaaaaaaaaaaaaaaaa

SEQ ID NO: 837 - DNA, 59 bp, synthetic construct
  misc_feature 1..59: note = Description of sequence: Primer
  source 1..59: mol_type = other DNA
atggacgacgacgacaagattcctgataccagagaaaaaaaaaaaaaaaaaaaaaaaaa

SEQ ID NO: 838 - DNA, 59 bp, synthetic construct
  misc_feature 1..59: note = Description of sequence: Primer
  source 1..59: mol_type = other DNA
atggacgacgacgacaagtgcaaatgcccaatacaaaaaaaaaaaaaaaaaaaaaaaaa

SEQ ID NO: 839 - DNA, 59 bp, synthetic construct
  misc_feature 1..59: note = Description of sequence: Primer
  source 1..59: mol_type = other DNA
atggacgacgacgacaagtcattgttgggtaacgaaaaaaaaaaaaaaaaaaaaaaaaa

SEQ ID NO: 840 - DNA, 59 bp, synthetic construct
  misc_feature 1..59: note = Description of sequence: Primer
  source 1..59: mol_type = other DNA
atggacgacgacgacaagcagtagccacgtgtgaaaaaaaaaaaaaaaaaaaaaaaaaa

SEQ ID NO: 841 - DNA, 59 bp, synthetic construct
  misc_feature 1..59: note = Description of sequence: Primer
  source 1..59: mol_type = other DNA
atggacgacgacgacaagagaggatgggattactaaaaaaaaaaaaaaaaaaaaaaaaa

SEQ ID NO: 842 - DNA, 59 bp, synthetic construct
  misc_feature 1..59: note = Description of sequence: Primer
  source 1..59: mol_type = other DNA
atggacgacgacgacaagctataagcgaaaccagaaaaaaaaaaaaaaaaaaaaaaaaa

SEQ ID NO: 843 - DNA, 59 bp, synthetic construct
  misc_feature 1..59: note = Description of sequence: Primer
  source 1..59: mol_type = other DNA
atggacgacgacgacaagtgacgggctgtagtttaaaaaaaaaaaaaaaaaaaaaaaaa

SEQ ID NO: 844 - DNA, 59 bp, synthetic construct
  misc_feature 1..59: note = Description of sequence: Primer
  source 1..59: mol_type = other DNA
atggacgacgacgacaagcctgtgtaagacgctgaaaaaaaaaaaaaaaaaaaaaaaaa

SEQ ID NO: 845 - DNA, 59 bp, synthetic construct
  misc_feature 1..59: note = Description of sequence: Primer
  source 1..59: mol_type = other DNA
atggacgacgacgacaagtatggagacacaaacgaaaaaaaaaaaaaaaaaaaaaaaaa

SEQ ID NO: 846 - DNA, 59 bp, synthetic construct
  misc_feature 1..59: note = Description of sequence: Primer
  source 1..59: mol_type = other DNA
atggacgacgacgacaagtacgaagggcagcataaaaaaaaaaaaaaaaaaaaaaaaaa

SEQ ID NO: 847 - DNA, 59 bp, synthetic construct
  misc_feature 1..59: note = Description of sequence: Primer
  source 1..59: mol_type = other DNA
atggacgacgacgacaagggccgatatagcaagtaaaaaaaaaaaaaaaaaaaaaaaaa

SEQ ID NO: 848 - DNA, 59 bp, synthetic construct
  misc_feature 1..59: note = Description of sequence: Primer
  source 1..59: mol_type = other DNA
atggacgacgacgacaaggagtggtcacacaggtaaaaaaaaaaaaaaaaaaaaaaaaa

SEQ ID NO: 849 - DNA, 59 bp, synthetic construct
  misc_feature 1..59: note = Description of sequence: Primer
  source 1..59: mol_type = other DNA
atggacgacgacgacaagatatgattcacggtggaaaaaaaaaaaaaaaaaaaaaaaaa

SEQ ID NO: 850 - DNA, 59 bp, synthetic construct
  misc_feature 1..59: note = Description of sequence: Primer
  source 1..59: mol_type = other DNA
atggacgacgacgacaagtgaccgagaccagagaaaaaaaaaaaaaaaaaaaaaaaaaa

SEQ ID NO: 851 - DNA, 59 bp, synthetic construct
  misc_feature 1..59: note = Description of sequence: Primer
  source 1..59: mol_type = other DNA
atggacgacgacgacaaggctatcattgagcggaaaaaaaaaaaaaaaaaaaaaaaaaa

SEQ ID NO: 852 - DNA, 59 bp, synthetic construct
  misc_feature 1..59: note = Description of sequence: Primer
  source 1..59: mol_type = other DNA
atggacgacgacgacaagtagtacgcaggttgataaaaaaaaaaaaaaaaaaaaaaaaa

SEQ ID NO: 853 - DNA, 59 bp, synthetic construct
  misc_feature 1..59: note = Description of sequence: Primer
  source 1..59: mol_type = other DNA
atggacgacgacgacaagtggatgtaacgcagcaaaaaaaaaaaaaaaaaaaaaaaaaa

SEQ ID NO: 854 - DNA, 59 bp, synthetic construct
  misc_feature 1..59: note = Description of sequence: Primer
  source 1..59: mol_type = other DNA
atggacgacgacgacaagtcaactttgagggcacaaaaaaaaaaaaaaaaaaaaaaaaa

SEQ ID NO: 855 - DNA, 59 bp, synthetic construct
  misc_feature 1..59: note = Description of sequence: Primer
  source 1..59: mol_type = other DNA
atggacgacgacgacaagctgaaaacctttgaggaaaaaaaaaaaaaaaaaaaaaaaaa

SEQ ID NO: 856 - DNA, 59 bp, synthetic construct
  misc_feature 1..59: note = Description of sequence: Primer
  source 1..59: mol_type = other DNA
atggacgacgacgacaagaaggaaatagagctccaaaaaaaaaaaaaaaaaaaaaaaaa

SEQ ID NO: 857 - DNA, 59 bp, synthetic construct
  misc_feature 1..59: note = Description of sequence: Primer
  source 1..59: mol_type = other DNA
atggacgacgacgacaaggtaaatcgccctggtaaaaaaaaaaaaaaaaaaaaaaaaaa

SEQ ID NO: 858 - DNA, 59 bp, synthetic construct
  misc_feature 1..59: note = Description of sequence: Primer
  source 1..59: mol_type = other DNA
atggacgacgacgacaaggccttgtgaagcacgaaaaaaaaaaaaaaaaaaaaaaaaaa

SEQ ID NO: 859 - DNA, 59 bp, synthetic construct
  misc_feature 1..59: note = Description of sequence: Primer
  source 1..59: mol_type = other DNA
atggacgacgacgacaagctattgaacaccgcagaaaaaaaaaaaaaaaaaaaaaaaaa

SEQ ID NO: 860 - DNA, 59 bp, synthetic construct
  misc_feature 1..59: note = Description of sequence: Primer
  source 1..59: mol_type = other DNA
atggacgacgacgacaagtagtcccgagaccagaaaaaaaaaaaaaaaaaaaaaaaaaa

SEQ ID NO: 861 - DNA, 59 bp, synthetic construct
  misc_feature 1..59: note = Description of sequence: Primer
  source 1..59: mol_type = other DNA
atggacgacgacgacaagtaccttcgaaagggccaaaaaaaaaaaaaaaaaaaaaaaaa

SEQ ID NO: 862 - DNA, 59 bp, synthetic construct
  misc_feature 1..59: note = Description of sequence: Primer
  source 1..59: mol_type = other DNA
atggacgacgacgacaagaggggaaagatgtcagaaaaaaaaaaaaaaaaaaaaaaaaa

SEQ ID NO: 863 - DNA, 59 bp, synthetic construct
  misc_feature 1..59: note = Description of sequence: Primer
  source 1..59: mol_type = other DNA
atggacgacgacgacaagcacacgagagaacaccaaaaaaaaaaaaaaaaaaaaaaaaa

SEQ ID NO: 864 - DNA, 59 bp, synthetic construct
  misc_feature 1..59: note = Description of sequence: Primer
  source 1..59: mol_type = other DNA
atggacgacgacgacaaggagaacaaacgtggcgaaaaaaaaaaaaaaaaaaaaaaaaa

SEQ ID NO: 865 - DNA, 59 bp, synthetic construct
  misc_feature 1..59: note = Description of sequence: Primer
  source 1..59: mol_type = other DNA
atggacgacgacgacaaggaaacaggaaccccacaaaaaaaaaaaaaaaaaaaaaaaaa

SEQ ID NO: 866 - DNA, 59 bp, synthetic construct
  misc_feature 1..59: note = Description of sequence: Primer
  source 1..59: mol_type = other DNA
atggacgacgacgacaaggtatgggaccaacaacaaaaaaaaaaaaaaaaaaaaaaaaa

SEQ ID NO: 867 - DNA, 59 bp, synthetic construct
  misc_feature 1..59: note = Description of sequence: Primer
  source 1..59: mol_type = other DNA
atggacgacgacgacaagagccgtgagttctccaaaaaaaaaaaaaaaaaaaaaaaaaa

SEQ ID NO: 868 - DNA, 59 bp, synthetic construct
  misc_feature 1..59: note = Description of sequence: Primer
  source 1..59: mol_type = other DNA
atggacgacgacgacaagagcacggtagtgatgaaaaaaaaaaaaaaaaaaaaaaaaaa

SEQ ID NO: 869 - DNA, 59 bp, synthetic construct
  misc_feature 1..59: note = Description of sequence: Primer
  source 1..59: mol_type = other DNA
atggacgacgacgacaagctcggcaatgaactgcaaaaaaaaaaaaaaaaaaaaaaaaa

SEQ ID NO: 870 - DNA, 59 bp, synthetic construct
  misc_feature 1..59: note = Description of sequence: Primer
  source 1..59: mol_type = other DNA
atggacgacgacgacaagttcacggggagctacaaaaaaaaaaaaaaaaaaaaaaaaaa

SEQ ID NO: 871 - DNA, 59 bp, synthetic construct
  misc_feature 1..59: note = Description of sequence: Primer
  source 1..59: mol_type = other DNA
atggacgacgacgacaagcccggaatattccctaaaaaaaaaaaaaaaaaaaaaaaaaa

SEQ ID NO: 872 - DNA, 59 bp, synthetic construct
  misc_feature 1..59: note = Description of sequence: Primer
  source 1..59: mol_type = other DNA
atggacgacgacgacaaggcatcgtttccaacggaaaaaaaaaaaaaaaaaaaaaaaaa

SEQ ID NO: 873 - DNA, 59 bp, synthetic construct
  misc_feature 1..59: note = Description of sequence: Primer
  source 1..59: mol_type = other DNA
atggacgacgacgacaagaaagtaagccaaccgcaaaaaaaaaaaaaaaaaaaaaaaaa

SEQ ID NO: 874 - DNA, 59 bp, synthetic construct
  misc_feature 1..59: note = Description of sequence: Primer
  source 1..59: mol_type = other DNA
atggacgacgacgacaagagcctagcttaatgcgaaaaaaaaaaaaaaaaaaaaaaaaa

SEQ ID NO: 875 - DNA, 59 bp, synthetic construct
  misc_feature 1..59: note = Description of sequence: Primer
  source 1..59: mol_type = other DNA
atggacgacgacgacaaggttaccctgcttcgagaaaaaaaaaaaaaaaaaaaaaaaaa

SEQ ID NO: 876 - DNA, 59 bp, synthetic construct
  misc_feature 1..59: note = Description of sequence: Primer
  source 1..59: mol_type = other DNA
atggacgacgacgacaaggagtgaaagtcaccccaaaaaaaaaaaaaaaaaaaaaaaaa

SEQ ID NO: 877 - DNA, 59 bp, synthetic construct
  misc_feature 1..59: note = Description of sequence: Primer
  source 1..59: mol_type = other DNA
atggacgacgacgacaagctagtctatttgcgacaaaaaaaaaaaaaaaaaaaaaaaaa

SEQ ID NO: 878 - DNA, 59 bp, synthetic construct
  misc_feature 1..59: note = Description of sequence: Primer
  source 1..59: mol_type = other DNA
atggacgacgacgacaaggttgggtaaacgcagcaaaaaaaaaaaaaaaaaaaaaaaaa

SEQ ID NO: 879 - DNA, 59 bp, synthetic construct
  misc_feature 1..59: note = Description of sequence: Primer
  source 1..59: mol_type = other DNA
atggacgacgacgacaagtggaactgtatagctgaaaaaaaaaaaaaaaaaaaaaaaaa

SEQ ID NO: 880 - DNA, 59 bp, synthetic construct
  misc_feature 1..59: note = Description of sequence: Primer
  source 1..59: mol_type = other DNA
atggacgacgacgacaagctgacagttcacccgtaaaaaaaaaaaaaaaaaaaaaaaaa

SEQ ID NO: 881 - DNA, 59 bp, synthetic construct
  misc_feature 1..59: note = Description of sequence: Primer
  source 1..59: mol_type = other DNA
atggacgacgacgacaagtcaactggcatgtgtaaaaaaaaaaaaaaaaaaaaaaaaaa

SEQ ID NO: 882 - DNA, 59 bp, synthetic construct
  misc_feature 1..59: note = Description of sequence: Primer
  source 1..59: mol_type = other DNA
atggacgacgacgacaagcctactggtactacgcaaaaaaaaaaaaaaaaaaaaaaaaa

SEQ ID NO: 883 - DNA, 59 bp, synthetic construct
  misc_feature 1..59: note = Description of sequence: Primer
  source 1..59: mol_type = other DNA
atggacgacgacgacaagactaggtgctcagttcaaaaaaaaaaaaaaaaaaaaaaaaa

SEQ ID NO: 884 - DNA, 59 bp, synthetic construct
  misc_feature 1..59: note = Description of sequence: Primer
  source 1..59: mol_type = other DNA
atggacgacgacgacaagaagcgtgttgctgcagaaaaaaaaaaaaaaaaaaaaaaaaa

SEQ ID NO: 885 - DNA, 59 bp, synthetic construct
  misc_feature 1..59: note = Description of sequence: Primer
  source 1..59: mol_type = other DNA
atggacgacgacgacaagcagctgagatcaggtcaaaaaaaaaaaaaaaaaaaaaaaaa

SEQ ID NO: 886 - DNA, 59 bp, synthetic construct
  misc_feature 1..59: note = Description of sequence: Primer
  source 1..59: mol_type = other DNA
atggacgacgacgacaaggcactgcttatagaagaaaaaaaaaaaaaaaaaaaaaaaaa

SEQ ID NO: 887 - DNA, 59 bp, synthetic construct
  misc_feature 1..59: note = Description of sequence: Primer
  source 1..59: mol_type = other DNA
atggacgacgacgacaagtgatgtacgattggagaaaaaaaaaaaaaaaaaaaaaaaaa

SEQ ID NO: 888 - DNA, 59 bp, synthetic construct
  misc_feature 1..59: note = Description of sequence: Primer
  source 1..59: mol_type = other DNA
atggacgacgacgacaagttcagtggacatcctcaaaaaaaaaaaaaaaaaaaaaaaaa

SEQ ID NO: 889 - DNA, 59 bp, synthetic construct
  misc_feature 1..59: note = Description of sequence: Primer
  source 1..59: mol_type = other DNA
atggacgacgacgacaaggttttaggtagggaagaaaaaaaaaaaaaaaaaaaaaaaaa

SEQ ID NO: 890 - DNA, 59 bp, synthetic construct
  misc_feature 1..59: note = Description of sequence: Primer
  source 1..59: mol_type = other DNA
atggacgacgacgacaagtgtgacaagcatgagtaaaaaaaaaaaaaaaaaaaaaaaaa

SEQ ID NO: 891 - DNA, 59 bp, synthetic construct
  misc_feature 1..59: note = Description of sequence: Primer
  source 1..59: mol_type = other DNA
atggacgacgacgacaagggattcccctaagcagaaaaaaaaaaaaaaaaaaaaaaaaa

SEQ ID NO: 892 - DNA, 59 bp, synthetic construct
  misc_feature 1..59: note = Description of sequence: Primer
  source 1..59: mol_type = other DNA
atggacgacgacgacaagcagcctatcgaccaagaaaaaaaaaaaaaaaaaaaaaaaaa

SEQ ID NO: 893 - DNA, 59 bp, synthetic construct
  misc_feature 1..59: note = Description of sequence: Primer
  source 1..59: mol_type = other DNA
atggacgacgacgacaagtatcggtagtccctctaaaaaaaaaaaaaaaaaaaaaaaaa

SEQ ID NO: 894 - DNA, 59 bp, synthetic construct
  misc_feature 1..59: note = Description of sequence: Primer
  source 1..59: mol_type = other DNA
atggacgacgacgacaagttacgcgttcagacggaaaaaaaaaaaaaaaaaaaaaaaaa

SEQ ID NO: 895 - DNA, 59 bp, synthetic construct
  misc_feature 1..59: note = Description of sequence: Primer
  source 1..59: mol_type = other DNA
atggacgacgacgacaagatgaggtagctccaccaaaaaaaaaaaaaaaaaaaaaaaaa

SEQ ID NO: 896 - DNA, 59 bp, synthetic construct
  misc_feature 1..59: note = Description of sequence: Primer
  source 1..59: mol_type = other DNA
atggacgacgacgacaagggggagtgtgtgtataaaaaaaaaaaaaaaaaaaaaaaaaa

SEQ ID NO: 897 - DNA, 59 bp, synthetic construct
  misc_feature 1..59: note = Description of sequence: Primer
  source 1..59: mol_type = other DNA
atggacgacgacgacaaggttcgggcttttcgacaaaaaaaaaaaaaaaaaaaaaaaaa

SEQ ID NO: 898 - DNA, 59 bp, synthetic construct
  misc_feature 1..59: note = Description of sequence: Primer
  source 1..59: mol_type = other DNA
atggacgacgacgacaagtgcgcagaaacctcgaaaaaaaaaaaaaaaaaaaaaaaaaa

SEQ ID NO: 899 - DNA, 59 bp, synthetic construct
  misc_feature 1..59: note = Description of sequence: Primer
  source 1..59: mol_type = other DNA
atggacgacgacgacaagcggtaccgtttcacgaaaaaaaaaaaaaaaaaaaaaaaaaa

SEQ ID NO: 900 - DNA, 59 bp, synthetic construct
  misc_feature 1..59: note = Description of sequence: Primer
  source 1..59: mol_type = other DNA
atggacgacgacgacaagccgattgatgaacgtcaaaaaaaaaaaaaaaaaaaaaaaaa

SEQ ID NO: 901 - DNA, 59 bp, synthetic construct
  misc_feature 1..59: note = Description of sequence: Primer
  source 1..59: mol_type = other DNA
atggacgacgacgacaagatcacctgaggaactaaaaaaaaaaaaaaaaaaaaaaaaaa

SEQ ID NO: 902 - DNA, 59 bp, synthetic construct
  misc_feature 1..59: note = Description of sequence: Primer
  source 1..59: mol_type = other DNA
atggacgacgacgacaagctcgaattagcgcggaaaaaaaaaaaaaaaaaaaaaaaaaa

SEQ ID NO: 903 - DNA, 59 bp, synthetic construct
  misc_feature 1..59: note = Description of sequence: Primer
  source 1..59: mol_type = other DNA
atggacgacgacgacaagatacagagacgaccataaaaaaaaaaaaaaaaaaaaaaaaa

SEQ ID NO: 904 - DNA, 59 bp, synthetic construct
  misc_feature 1..59: note = Description of sequence: Primer
  source 1..59: mol_type = other DNA
atggacgacgacgacaagggtacactgaaatggtaaaaaaaaaaaaaaaaaaaaaaaaa

SEQ ID NO: 905 - DNA, 59 bp, synthetic construct
  misc_feature 1..59: note = Description of sequence: Primer
  source 1..59: mol_type = other DNA
atggacgacgacgacaagcaggatgaacctatacaaaaaaaaaaaaaaaaaaaaaaaaa

SEQ ID NO: 906 - DNA, 59 bp, synthetic construct
  misc_feature 1..59: note = Description of sequence: Primer
  source 1..59: mol_type = other DNA
atggacgacgacgacaagcagatggccgataagaaaaaaaaaaaaaaaaaaaaaaaaaa

SEQ ID NO: 907 - DNA, 59 bp, synthetic construct
  misc_feature 1..59: note = Description of sequence: Primer
  source 1..59: mol_type = other DNA
atggacgacgacgacaagctagtgagggcgcattaaaaaaaaaaaaaaaaaaaaaaaaa

SEQ ID NO: 908 - DNA, 59 bp, synthetic construct
  misc_feature 1..59: note = Description of sequence: Primer
  source 1..59: mol_type = other DNA
atggacgacgacgacaagtgatacgactagcgccaaaaaaaaaaaaaaaaaaaaaaaaa

SEQ ID NO: 909 - DNA, 59 bp, synthetic construct
  misc_feature 1..59: note = Description of sequence: Primer
  source 1..59: mol_type = other DNA
atggacgacgacgacaaggatcacctgcaggctaaaaaaaaaaaaaaaaaaaaaaaaaa

SEQ ID NO: 910 - DNA, 59 bp, synthetic construct
  misc_feature 1..59: note = Description of sequence: Primer
  source 1..59: mol_type = other DNA
atggacgacgacgacaaggcatgttgccagaagaaaaaaaaaaaaaaaaaaaaaaaaaa

SEQ ID NO: 911 - DNA, 59 bp, synthetic construct
  misc_feature 1..59: note = Description of sequence: Primer
  source 1..59: mol_type = other DNA
atggacgacgacgacaaggagacgtagtactatgaaaaaaaaaaaaaaaaaaaaaaaaa

SEQ ID NO: 912 - DNA, 59 bp, synthetic construct
  misc_feature 1..59: note = Description of sequence: Primer
  source 1..59: mol_type = other DNA
atggacgacgacgacaagtccagctcaacaacgtaaaaaaaaaaaaaaaaaaaaaaaaa

SEQ ID NO: 913 - DNA, 59 bp, synthetic construct
  misc_feature 1..59: note = Description of sequence: Primer
  source 1..59: mol_type = other DNA
atggacgacgacgacaagcagtgcctgagatgacaaaaaaaaaaaaaaaaaaaaaaaaa

SEQ ID NO: 914 - DNA, 59 bp, synthetic construct
  misc_feature 1..59: note = Description of sequence: Primer
  source 1..59: mol_type = other DNA
atggacgacgacgacaagagcacctctaagtcggaaaaaaaaaaaaaaaaaaaaaaaaa

SEQ ID NO: 915 - DNA, 59 bp, synthetic construct
  misc_feature 1..59: note = Description of sequence: Primer
  source 1..59: mol_type = other DNA
atggacgacgacgacaagttgcgttagagtgtcgaaaaaaaaaaaaaaaaaaaaaaaaa

SEQ ID NO: 916 - DNA, 59 bp, synthetic construct
  misc_feature 1..59: note = Description of sequence: Primer
  source 1..59: mol_type = other DNA
atggacgacgacgacaaggtcaaatcgtctgcacaaaaaaaaaaaaaaaaaaaaaaaaa

SEQ ID NO: 917 - DNA, 59 bp, synthetic construct
  misc_feature 1..59: note = Description of sequence: Primer
  source 1..59: mol_type = other DNA
atggacgacgacgacaaggcaacttgtgcctacaaaaaaaaaaaaaaaaaaaaaaaaaa

SEQ ID NO: 918 - DNA, 59 bp, synthetic construct
  misc_feature 1..59: note = Description of sequence: Primer
  source 1..59: mol_type = other DNA
atggacgacgacgacaagcgagcaaagtgtccttaaaaaaaaaaaaaaaaaaaaaaaaa

SEQ ID NO: 919 - DNA, 59 bp, synthetic construct
  misc_feature 1..59: note = Description of sequence: Primer
  source 1..59: mol_type = other DNA
atggacgacgacgacaagcatgaaagacacgacgaaaaaaaaaaaaaaaaaaaaaaaaa

SEQ ID NO: 920 - DNA, 59 bp, synthetic construct
  misc_feature 1..59: note = Description of sequence: Primer
  source 1..59: mol_type = other DNA
atggacgacgacgacaagaggagtatctcacacaaaaaaaaaaaaaaaaaaaaaaaaaa

SEQ ID NO: 921 - DNA, 59 bp, synthetic construct
  misc_feature 1..59: note = Description of sequence: Primer
  source 1..59: mol_type = other DNA
atggacgacgacgacaagtcgtgcatacctagagaaaaaaaaaaaaaaaaaaaaaaaaa

SEQ ID NO: 922 - DNA, 59 bp, synthetic construct
  misc_feature 1..59: note = Description of sequence: Primer
  source 1..59: mol_type = other DNA
atggacgacgacgacaagctcattcccagatcggaaaaaaaaaaaaaaaaaaaaaaaaa

SEQ ID NO: 923 - DNA, 59 bp, synthetic construct
  misc_feature 1..59: note = Description of sequence: Primer
  source 1..59: mol_type = other DNA
atggacgacgacgacaagtacctagcaaggacggaaaaaaaaaaaaaaaaaaaaaaaaa

SEQ ID NO: 924 - DNA, 59 bp, synthetic construct
  misc_feature 1..59: note = Description of sequence: Primer
  source 1..59: mol_type = other DNA
atggacgacgacgacaagtacagagtccgctgttaaaaaaaaaaaaaaaaaaaaaaaaa

SEQ ID NO: 925 - DNA, 59 bp, synthetic construct
  misc_feature 1..59: note = Description of sequence: Primer
  source 1..59: mol_type = other DNA
atggacgacgacgacaagctgttggaatttctggaaaaaaaaaaaaaaaaaaaaaaaaa

SEQ ID NO: 926 - DNA, 59 bp, synthetic construct
  misc_feature 1..59: note = Description of sequence: Primer
  source 1..59: mol_type = other DNA
atggacgacgacgacaagtaggccgaagtaccacaaaaaaaaaaaaaaaaaaaaaaaaa

SEQ ID NO: 927 - DNA, 59 bp, synthetic construct
  misc_feature 1..59: note = Description of sequence: Primer
  source 1..59: mol_type = other DNA
atggacgacgacgacaagcacgtaacgagtttgcaaaaaaaaaaaaaaaaaaaaaaaaa

SEQ ID NO: 928 - DNA, 59 bp, synthetic construct
  misc_feature 1..59: note = Description of sequence: Primer
  source 1..59: mol_type = other DNA
atggacgacgacgacaagggtcctaatctatgtgaaaaaaaaaaaaaaaaaaaaaaaaa

SEQ ID NO: 929 - DNA, 59 bp, synthetic construct
  misc_feature 1..59: note = Description of sequence: Primer
  source 1..59: mol_type = other DNA
atggacgacgacgacaaggagcgtgcagattaccaaaaaaaaaaaaaaaaaaaaaaaaa

SEQ ID NO: 930 - DNA, 59 bp, synthetic construct
  misc_feature 1..59: note = Description of sequence: Primer
  source 1..59: mol_type = other DNA
atggacgacgacgacaagtcactcgaacggagacaaaaaaaaaaaaaaaaaaaaaaaaa

SEQ ID NO: 931 - DNA, 59 bp, synthetic construct
  misc_feature 1..59: note = Description of sequence: Primer
  source 1..59: mol_type = other DNA
atggacgacgacgacaagtgggcaacagagtaggaaaaaaaaaaaaaaaaaaaaaaaaa

SEQ ID NO: 932 - DNA, 59 bp, synthetic construct
  misc_feature 1..59: note = Description of sequence: Primer
  source 1..59: mol_type = other DNA
atggacgacgacgacaagtgatatggagacaccaaaaaaaaaaaaaaaaaaaaaaaaaa

SEQ ID NO: 933 - DNA, 59 bp, synthetic construct
  misc_feature 1..59: note = Description of sequence: Primer
  source 1..59: mol_type = other DNA
atggacgacgacgacaagcattgtggcaagactgaaaaaaaaaaaaaaaaaaaaaaaaa

SEQ ID NO: 934 - DNA, 59 bp, synthetic construct
  misc_feature 1..59: note = Description of sequence: Primer
  source 1..59: mol_type = other DNA
atggacgacgacgacaagttatgactaccgcacaaaaaaaaaaaaaaaaaaaaaaaaaa

SEQ ID NO: 935 - DNA, 59 bp, synthetic construct
  misc_feature 1..59: note = Description of sequence: Primer
  source 1..59: mol_type = other DNA
atggacgacgacgacaagtatgcggaacgttgtgaaaaaaaaaaaaaaaaaaaaaaaaa

SEQ ID NO: 936 - DNA, 59 bp, synthetic construct
  misc_feature 1..59: note = Description of sequence: Primer
  source 1..59: mol_type = other DNA
atggacgacgacgacaagccattgcgtcttgtccaaaaaaaaaaaaaaaaaaaaaaaaa

SEQ ID NO: 937 - DNA, 59 bp, synthetic construct
  misc_feature 1..59: note = Description of sequence: Primer
  source 1..59: mol_type = other DNA
atggacgacgacgacaagtggcgctgcgtataataaaaaaaaaaaaaaaaaaaaaaaaa

SEQ ID NO: 938 - DNA, 59 bp, synthetic construct
  misc_feature 1..59: note = Description of sequence: Primer
  source 1..59: mol_type = other DNA
atggacgacgacgacaagtgccttacgacacgtaaaaaaaaaaaaaaaaaaaaaaaaaa

SEQ ID NO: 939 - DNA, 59 bp, synthetic construct
  misc_feature 1..59: note = Description of sequence: Primer
  source 1..59: mol_type = other DNA
atggacgacgacgacaaggtttgggtaggagggaaaaaaaaaaaaaaaaaaaaaaaaaa

SEQ ID NO: 940 - DNA, 59 bp, synthetic construct
  misc_feature 1..59: note = Description of sequence: Primer
  source 1..59: mol_type = other DNA
atggacgacgacgacaaggttcgttttcggtgccaaaaaaaaaaaaaaaaaaaaaaaaa

SEQ ID NO: 941 - DNA, 59 bp, synthetic construct
  misc_feature 1..59: note = Description of sequence: Primer
  source 1..59: mol_type = other DNA
atggacgacgacgacaagatattcgccggcaaataaaaaaaaaaaaaaaaaaaaaaaaa

SEQ ID NO: 942 - DNA, 59 bp, synthetic construct
  misc_feature 1..59: note = Description of sequence: Primer
  source 1..59: mol_type = other DNA
atggacgacgacgacaaggggaatcatttgctccaaaaaaaaaaaaaaaaaaaaaaaaa

SEQ ID NO: 943 - DNA, 59 bp, synthetic construct
  misc_feature 1..59: note = Description of sequence: Primer
  source 1..59: mol_type = other DNA
atggacgacgacgacaagccacggaactcgatgtaaaaaaaaaaaaaaaaaaaaaaaaa

SEQ ID NO: 944 - DNA, 59 bp, synthetic construct
  misc_feature 1..59: note = Description of sequence: Primer
  source 1..59: mol_type = other DNA
atggacgacgacgacaaggtaatctttgctctcgaaaaaaaaaaaaaaaaaaaaaaaaa

SEQ ID NO: 945 - DNA, 59 bp, synthetic construct
  misc_feature 1..59: note = Description of sequence: Primer
  source 1..59: mol_type = other DNA
atggacgacgacgacaagaagtgcggtatcgaggaaaaaaaaaaaaaaaaaaaaaaaaa

SEQ ID NO: 946 - DNA, 59 bp, synthetic construct
  misc_feature 1..59: note = Description of sequence: Primer
  source 1..59: mol_type = other DNA
atggacgacgacgacaaggggctgcaagttcacaaaaaaaaaaaaaaaaaaaaaaaaaa

SEQ ID NO: 947 - DNA, 59 bp, synthetic construct
  misc_feature 1..59: note = Description of sequence: Primer
  source 1..59: mol_type = other DNA
atggacgacgacgacaagaacccaagcagctatcaaaaaaaaaaaaaaaaaaaaaaaaa

SEQ ID NO: 948 - DNA, 59 bp, synthetic construct
  misc_feature 1..59: note = Description of sequence: Primer
  source 1..59: mol_type = other DNA
atggacgacgacgacaaggatggagaggttgaataaaaaaaaaaaaaaaaaaaaaaaaa

SEQ ID NO: 949 - DNA, 59 bp, synthetic construct
  misc_feature 1..59: note = Description of sequence: Primer
  source 1..59: mol_type = other DNA
atggacgacgacgacaagttagaggttgacggtaaaaaaaaaaaaaaaaaaaaaaaaaa

SEQ ID NO: 950 - DNA, 59 bp, synthetic construct
  misc_feature 1..59: note = Description of sequence: Primer
  source 1..59: mol_type = other DNA
atggacgacgacgacaaggataatctccgacggcaaaaaaaaaaaaaaaaaaaaaaaaa

SEQ ID NO: 951 - DNA, 59 bp, synthetic construct
  misc_feature 1..59: note = Description of sequence: Primer
  source 1..59: mol_type = other DNA
atggacgacgacgacaagagattagtgctcccgaaaaaaaaaaaaaaaaaaaaaaaaaa

SEQ ID NO: 952 - DNA, 59 bp, synthetic construct
  misc_feature 1..59: note = Description of sequence: Primer
  source 1..59: mol_type = other DNA
atggacgacgacgacaagactccagttcttgtacaaaaaaaaaaaaaaaaaaaaaaaaa

SEQ ID NO: 953 - DNA, 59 bp, synthetic construct
  misc_feature 1..59: note = Description of sequence: Primer
  source 1..59: mol_type = other DNA
atggacgacgacgacaagcaccctactcaaagacaaaaaaaaaaaaaaaaaaaaaaaaa

SEQ ID NO: 954 - DNA, 59 bp, synthetic construct
  misc_feature 1..59: note = Description of sequence: Primer
  source 1..59: mol_type = other DNA
atggacgacgacgacaagtacctcatacgcgttgaaaaaaaaaaaaaaaaaaaaaaaaa

SEQ ID NO: 955 - DNA, 59 bp, synthetic construct
  misc_feature 1..59: note = Description of sequence: Primer
  source 1..59: mol_type = other DNA
atggacgacgacgacaagcgaaaatcgggtagataaaaaaaaaaaaaaaaaaaaaaaaa

SEQ ID NO: 956 - DNA, 59 bp, synthetic construct
  misc_feature 1..59: note = Description of sequence: Primer
  source 1..59: mol_type = other DNA
atggacgacgacgacaagcgatcgctcctaccataaaaaaaaaaaaaaaaaaaaaaaaa

SEQ ID NO: 957 - DNA, 59 bp, synthetic construct
  misc_feature 1..59: note = Description of sequence: Primer
  source 1..59: mol_type = other DNA
atggacgacgacgacaagcccactccatactagaaaaaaaaaaaaaaaaaaaaaaaaaa

SEQ ID NO: 958 - DNA, 59 bp, synthetic construct
  misc_feature 1..59: note = Description of sequence: Primer
  source 1..59: mol_type = other DNA
atggacgacgacgacaagacggctttacgcaagaaaaaaaaaaaaaaaaaaaaaaaaaa

SEQ ID NO: 959 - DNA, 59 bp, synthetic construct
  misc_feature 1..59: note = Description of sequence: Primer
  source 1..59: mol_type = other DNA
atggacgacgacgacaagtcgcagaaccatctgcaaaaaaaaaaaaaaaaaaaaaaaaa

SEQ ID NO: 960 - DNA, 59 bp, synthetic construct
  misc_feature 1..59: note = Description of sequence: Primer
  source 1..59: mol_type = other DNA
atggacgacgacgacaaggagttgctagcctgtaaaaaaaaaaaaaaaaaaaaaaaaaa

SEQ ID NO: 961 - DNA, 59 bp, synthetic construct
  misc_feature 1..59: note = Description of sequence: Primer
  source 1..59: mol_type = other DNA
atggacgacgacgacaagttaactgcttcagccgaaaaaaaaaaaaaaaaaaaaaaaaa

SEQ ID NO: 962 - DNA, 59 bp, synthetic construct
  misc_feature 1..59: note = Description of sequence: Primer
  source 1..59: mol_type = other DNA
atggacgacgacgacaagtcgcgatgaccgctataaaaaaaaaaaaaaaaaaaaaaaaa

SEQ ID NO: 963 - DNA, 59 bp, synthetic construct
  misc_feature 1..59: note = Description of sequence: Primer
  source 1..59: mol_type = other DNA
atggacgacgacgacaaggacgaacgcgttaccaaaaaaaaaaaaaaaaaaaaaaaaaa

SEQ ID NO: 964 - DNA, 59 bp, synthetic construct
  misc_feature 1..59: note = Description of sequence: Primer
  source 1..59: mol_type = other DNA
atggacgacgacgacaagcggcaaaactactgtcaaaaaaaaaaaaaaaaaaaaaaaaa

SEQ ID NO: 965 - DNA, 59 bp, synthetic construct
  misc_feature 1..59: note = Description of sequence: Primer
  source 1..59: mol_type = other DNA
atggacgacgacgacaagcccgactctgatgaagaaaaaaaaaaaaaaaaaaaaaaaaa

SEQ ID NO: 966 - DNA, 59 bp, synthetic construct
  misc_feature 1..59: note = Description of sequence: Primer
  source 1..59: mol_type = other DNA
atggacgacgacgacaagactgcgctacagagtcaaaaaaaaaaaaaaaaaaaaaaaaa

SEQ ID NO: 967 - DNA, 59 bp, synthetic construct
  misc_feature 1..59: note = Description of sequence: Primer
  source 1..59: mol_type = other DNA
atggacgacgacgacaagacggtgtaccttagggaaaaaaaaaaaaaaaaaaaaaaaaa

SEQ ID NO: 968 - DNA, 59 bp, synthetic construct
  misc_feature 1..59: note = Description of sequence: Primer
  source 1..59: mol_type = other DNA
atggacgacgacgacaagtcgagtccgcagtatcaaaaaaaaaaaaaaaaaaaaaaaaa

SEQ ID NO: 969 - DNA, 59 bp, synthetic construct
  misc_feature 1..59: note = Description of sequence: Primer
  source 1..59: mol_type = other DNA
atggacgacgacgacaaggacgctgcctaattggaaaaaaaaaaaaaaaaaaaaaaaaa

SEQ ID NO: 970 - DNA, 59 bp, synthetic construct
  misc_feature 1..59: note = Description of sequence: Primer
  source 1..59: mol_type = other DNA
atggacgacgacgacaagtggggatggactagtaaaaaaaaaaaaaaaaaaaaaaaaaa

SEQ ID NO: 971 - DNA, 59 bp, synthetic construct
  misc_feature 1..59: note = Description of sequence: Primer
  source 1..59: mol_type = other DNA
atggacgacgacgacaaggctctaaaggccacagaaaaaaaaaaaaaaaaaaaaaaaaa

SEQ ID NO: 972 - DNA, 59 bp, synthetic construct
  misc_feature 1..59: note = Description of sequence: Primer
  source 1..59: mol_type = other DNA
atggacgacgacgacaagcaggagtggtgccttaaaaaaaaaaaaaaaaaaaaaaaaaa

SEQ ID NO: 973 - DNA, 59 bp, synthetic construct
  misc_feature 1..59: note = Description of sequence: Primer
  source 1..59: mol_type = other DNA
atggacgacgacgacaagccgagaagtgttttgaaaaaaaaaaaaaaaaaaaaaaaaaa

SEQ ID NO: 974 - DNA, 59 bp, synthetic construct
  misc_feature 1..59: note = Description of sequence: Primer
  source 1..59: mol_type = other DNA
atggacgacgacgacaagtgttcaagccacctagaaaaaaaaaaaaaaaaaaaaaaaaa

SEQ ID NO: 975 - DNA, 59 bp, synthetic construct
  misc_feature 1..59: note = Description of sequence: Primer
  source 1..59: mol_type = other DNA
atggacgacgacgacaagctcccttgagtgtagcaaaaaaaaaaaaaaaaaaaaaaaaa

SEQ ID NO: 976 - DNA, 59 bp, synthetic construct
  misc_feature 1..59: note = Description of sequence: Primer
  source 1..59: mol_type = other DNA
atggacgacgacgacaagaatgagcactaccgacaaaaaaaaaaaaaaaaaaaaaaaaa

SEQ ID NO: 977 - DNA, 59 bp, synthetic construct
  misc_feature 1..59: note = Description of sequence: Primer
  source 1..59: mol_type = other DNA
atggacgacgacgacaagacgcaagtcgcaaagcaaaaaaaaaaaaaaaaaaaaaaaaa

SEQ ID NO: 978 - DNA, 59 bp, synthetic construct
  misc_feature 1..59: note = Description of sequence: Primer
  source 1..59: mol_type = other DNA
atggacgacgacgacaagattgggagagtcagttaaaaaaaaaaaaaaaaaaaaaaaaa

SEQ ID NO: 979 - DNA, 59 bp, synthetic construct
  misc_feature 1..59: note = Description of sequence: Primer
  source 1..59: mol_type = other DNA
atggacgacgacgacaaggcgacctatataaagcaaaaaaaaaaaaaaaaaaaaaaaaa

SEQ ID NO: 980 - DNA, 59 bp, synthetic construct
  misc_feature 1..59: note = Description of sequence: Primer
  source 1..59: mol_type = other DNA
atggacgacgacgacaagatccgccacttcagataaaaaaaaaaaaaaaaaaaaaaaaa

SEQ ID NO: 981 - DNA, 59 bp, synthetic construct
  misc_feature 1..59: note = Description of sequence: Primer
  source 1..59: mol_type = other DNA
atggacgacgacgacaagtaagcgggttcctattaaaaaaaaaaaaaaaaaaaaaaaaa

SEQ ID NO: 982 - DNA, 59 bp, synthetic construct
  misc_feature 1..59: note = Description of sequence: Primer
  source 1..59: mol_type = other DNA
atggacgacgacgacaagaccctacgtaccgtcaaaaaaaaaaaaaaaaaaaaaaaaaa

SEQ ID NO: 983 - DNA, 59 bp, synthetic construct
  misc_feature 1..59: note = Description of sequence: Primer
  source 1..59: mol_type = other DNA
atggacgacgacgacaagtgcgccatcggttttcaaaaaaaaaaaaaaaaaaaaaaaaa

SEQ ID NO: 984 - DNA, 59 bp, synthetic construct
  misc_feature 1..59: note = Description of sequence: Primer
  source 1..59: mol_type = other DNA
atggacgacgacgacaaggcctaacttctgcctcaaaaaaaaaaaaaaaaaaaaaaaaa

SEQ ID NO: 985 - DNA, 59 bp, synthetic construct
  misc_feature 1..59: note = Description of sequence: Primer
  source 1..59: mol_type = other DNA
atggacgacgacgacaaggtcctttaatcccctaaaaaaaaaaaaaaaaaaaaaaaaaa

SEQ ID NO: 986 - DNA, 59 bp, synthetic construct
  misc_feature 1..59: note = Description of sequence: Primer
  source 1..59: mol_type = other DNA
atggacgacgacgacaaggattgtctagacgtagaaaaaaaaaaaaaaaaaaaaaaaaa

SEQ ID NO: 987 - DNA, 59 bp, synthetic construct
  misc_feature 1..59: note = Description of sequence: Primer
  source 1..59: mol_type = other DNA
atggacgacgacgacaagaacccgcaaaatcctaaaaaaaaaaaaaaaaaaaaaaaaaa

SEQ ID NO: 988 - DNA, 59 bp, synthetic construct
  misc_feature 1..59: note = Description of sequence: Primer
  source 1..59: mol_type = other DNA
atggacgacgacgacaagtacaacaccaacgctcaaaaaaaaaaaaaaaaaaaaaaaaa

SEQ ID NO: 989 - DNA, 59 bp, synthetic construct
  misc_feature 1..59: note = Description of sequence: Primer
  source 1..59: mol_type = other DNA
atggacgacgacgacaagtgtgctattgtctccaaaaaaaaaaaaaaaaaaaaaaaaaa

SEQ ID NO: 990 - DNA, 59 bp, synthetic construct
  misc_feature 1..59: note = Description of sequence: Primer
  source 1..59: mol_type = other DNA
atggacgacgacgacaagagatccacacccggttaaaaaaaaaaaaaaaaaaaaaaaaa

SEQ ID NO: 991 - DNA, 59 bp, synthetic construct
  misc_feature 1..59: note = Description of sequence: Primer
  source 1..59: mol_type = other DNA
atggacgacgacgacaaggtggtctccaccatcaaaaaaaaaaaaaaaaaaaaaaaaaa

SEQ ID NO: 992 - DNA, 59 bp, synthetic construct
  misc_feature 1..59: note = Description of sequence: Primer
  source 1..59: mol_type = other DNA
atggacgacgacgacaaggatattccgtcaaaccaaaaaaaaaaaaaaaaaaaaaaaaa

SEQ ID NO: 993 - DNA, 59 bp, synthetic construct
  misc_feature 1..59: note = Description of sequence: Primer
  source 1..59: mol_type = other DNA
atggacgacgacgacaagacatcgtcgcggattaaaaaaaaaaaaaaaaaaaaaaaaaa

SEQ ID NO: 994 - DNA, 59 bp, synthetic construct
  misc_feature 1..59: note = Description of sequence: Primer
  source 1..59: mol_type = other DNA
atggacgacgacgacaagaacggtatttggcggcaaaaaaaaaaaaaaaaaaaaaaaaa

SEQ ID NO: 995 - DNA, 59 bp, synthetic construct
  misc_feature 1..59: note = Description of sequence: Primer
  source 1..59: mol_type = other DNA
atggacgacgacgacaagcgctggattgcaaatgaaaaaaaaaaaaaaaaaaaaaaaaa

SEQ ID NO: 996 - DNA, 59 bp, synthetic construct
  misc_feature 1..59: note = Description of sequence: Primer
  source 1..59: mol_type = other DNA
atggacgacgacgacaagcaaaggggttacatcgaaaaaaaaaaaaaaaaaaaaaaaaa

SEQ ID NO: 997 - DNA, 59 bp, synthetic construct
  misc_feature 1..59: note = Description of sequence: Primer
  source 1..59: mol_type = other DNA
atggacgacgacgacaagcgagcagttcaaggagaaaaaaaaaaaaaaaaaaaaaaaaa

SEQ ID NO: 998 - DNA, 59 bp, synthetic construct
  misc_feature 1..59: note = Description of sequence: Primer
  source 1..59: mol_type = other DNA
atggacgacgacgacaagagtagggtccagcatgaaaaaaaaaaaaaaaaaaaaaaaaa

SEQ ID NO: 999 - DNA, 59 bp, synthetic construct
  misc_feature 1..59: note = Description of sequence: Primer
  source 1..59: mol_type = other DNA
atggacgacgacgacaagatgcttgcccagtctaaaaaaaaaaaaaaaaaaaaaaaaaa

SEQ ID NO: 1000 - DNA, 59 bp, synthetic construct
  misc_feature 1..59: note = Description of sequence: Primer
  source 1..59: mol_type = other DNA
atggacgacgacgacaagtcgtaaatctaggcgaaaaaaaaaaaaaaaaaaaaaaaaaa

SEQ ID NO: 1001 - DNA, 59 bp, synthetic construct
  misc_feature 1..59: note = Description of sequence: Primer
  source 1..59: mol_type = other DNA
atggacgacgacgacaagtggtgacatagagcgcaaaaaaaaaaaaaaaaaaaaaaaaa

SEQ ID NO: 1002 - DNA, 59 bp, synthetic construct
  misc_feature 1..59: note = Description of sequence: Primer
  source 1..59: mol_type = other DNA
atggacgacgacgacaagttggtcgacttcgaagaaaaaaaaaaaaaaaaaaaaaaaaa

SEQ ID NO: 1003 - DNA, 59 bp, synthetic construct
  misc_feature 1..59: note = Description of sequence: Primer
  source 1..59: mol_type = other DNA
atggacgacgacgacaagccacttaccgtctctcaaaaaaaaaaaaaaaaaaaaaaaaa

SEQ ID NO: 1004 - DNA, 59 bp, synthetic construct
  misc_feature 1..59: note = Description of sequence: Primer
  source 1..59: mol_type = other DNA
atggacgacgacgacaagtgtcctaagtcgacgaaaaaaaaaaaaaaaaaaaaaaaaaa

SEQ ID NO: 1005 - DNA, 59 bp, synthetic construct
  misc_feature 1..59: note = Description of sequence: Primer
  source 1..59: mol_type = other DNA
atggacgacgacgacaaggcgaacggacgataacaaaaaaaaaaaaaaaaaaaaaaaaa

SEQ ID NO: 1006 - DNA, 59 bp, synthetic construct
  misc_feature 1..59: note = Description of sequence: Primer
  source 1..59: mol_type = other DNA
atggacgacgacgacaagacggtgagtaaccatgaaaaaaaaaaaaaaaaaaaaaaaaa

SEQ ID NO: 1007 - DNA, 59 bp, synthetic construct
  misc_feature 1..59: note = Description of sequence: Primer
  source 1..59: mol_type = other DNA
atggacgacgacgacaaggaatgtgagacgggctaaaaaaaaaaaaaaaaaaaaaaaaa

SEQ ID NO: 1008 - DNA, 59 bp, synthetic construct
  misc_feature 1..59: note = Description of sequence: Primer
  source 1..59: mol_type = other DNA
atggacgacgacgacaaggattggtgtgctcgcaaaaaaaaaaaaaaaaaaaaaaaaaa

SEQ ID NO: 1009 - DNA, 59 bp, synthetic construct
  misc_feature 1..59: note = Description of sequence: Primer
  source 1..59: mol_type = other DNA
atggacgacgacgacaagcggacttcttacgttcaaaaaaaaaaaaaaaaaaaaaaaaa

SEQ ID NO: 1010 - DNA, 59 bp, synthetic construct
  misc_feature 1..59: note = Description of sequence: Primer
  source 1..59: mol_type = other DNA
atggacgacgacgacaagacatccaaaggctccaaaaaaaaaaaaaaaaaaaaaaaaaa

SEQ ID NO: 1011 - DNA, 59 bp, synthetic construct
  misc_feature 1..59: note = Description of sequence: Primer
  source 1..59: mol_type = other DNA
atggacgacgacgacaagttagagtccttacacgaaaaaaaaaaaaaaaaaaaaaaaaa

SEQ ID NO: 1012 - DNA, 59 bp, synthetic construct
  misc_feature 1..59: note = Description of sequence: Primer
  source 1..59: mol_type = other DNA
atggacgacgacgacaagacgctcaaggttgtgtaaaaaaaaaaaaaaaaaaaaaaaaa

SEQ ID NO: 1013 - DNA, 59 bp, synthetic construct
  misc_feature 1..59: note = Description of sequence: Primer
  source 1..59: mol_type = other DNA
atggacgacgacgacaagcggggcctaataatggaaaaaaaaaaaaaaaaaaaaaaaaa

SEQ ID NO: 1014 - DNA, 59 bp, synthetic construct
  misc_feature 1..59: note = Description of sequence: Primer
  source 1..59: mol_type = other DNA
atggacgacgacgacaagccgtaagcctggattgaaaaaaaaaaaaaaaaaaaaaaaaa

SEQ ID NO: 1015 - DNA, 59 bp, synthetic construct
  misc_feature 1..59: note = Description of sequence: Primer
  source 1..59: mol_type = other DNA
atggacgacgacgacaaggctacgctatgtgttaaaaaaaaaaaaaaaaaaaaaaaaaa

SEQ ID NO: 1016 - DNA, 59 bp, synthetic construct
  misc_feature 1..59: note = Description of sequence: Primer
  source 1..59: mol_type = other DNA
atggacgacgacgacaagaaacaccagtgggtagaaaaaaaaaaaaaaaaaaaaaaaaa

SEQ ID NO: 1017 - DNA, 59 bp, synthetic construct
  misc_feature 1..59: note = Description of sequence: Primer
  source 1..59: mol_type = other DNA
atggacgacgacgacaagttgactctaaggcaggaaaaaaaaaaaaaaaaaaaaaaaaa

SEQ ID NO: 1018 - DNA, 59 bp, synthetic construct
  misc_feature 1..59: note = Description of sequence: Primer
  source 1..59: mol_type = other DNA
atggacgacgacgacaagcactatttgtcttgggaaaaaaaaaaaaaaaaaaaaaaaaa

SEQ ID NO: 1019 - DNA, 59 bp, synthetic construct
  misc_feature 1..59: note = Description of sequence: Primer
  source 1..59: mol_type = other DNA
atggacgacgacgacaaggctacaagttgaccataaaaaaaaaaaaaaaaaaaaaaaaa

SEQ ID NO: 1020 - DNA, 59 bp, synthetic construct
  misc_feature 1..59: note = Description of sequence: Primer
  source 1..59: mol_type = other DNA
atggacgacgacgacaaggcagtagcggatactcaaaaaaaaaaaaaaaaaaaaaaaaa

SEQ ID NO: 1021 - DNA, 59 bp, synthetic construct
  misc_feature 1..59: note = Description of sequence: Primer
  source 1..59: mol_type = other DNA
atggacgacgacgacaagaactggtatcgctcacaaaaaaaaaaaaaaaaaaaaaaaaa

SEQ ID NO: 1022 - DNA, 59 bp, synthetic construct
  misc_feature 1..59: note = Description of sequence: Primer
  source 1..59: mol_type = other DNA
atggacgacgacgacaagagcttgacgagcctataaaaaaaaaaaaaaaaaaaaaaaaa

SEQ ID NO: 1023 - DNA, 59 bp, synthetic construct
  misc_feature 1..59: note = Description of sequence: Primer
  source 1..59: mol_type = other DNA
atggacgacgacgacaagattgccgatgagtagaaaaaaaaaaaaaaaaaaaaaaaaaa

SEQ ID NO: 1024 - DNA, 59 bp, synthetic construct
  misc_feature 1..59: note = Description of sequence: Primer
  source 1..59: mol_type = other DNA
atggacgacgacgacaagaacaggtggttacggtaaaaaaaaaaaaaaaaaaaaaaaaa

SEQ ID NO: 1025 - DNA, 59 bp, synthetic construct
  misc_feature 1..59: note = Description of sequence: Primer
  source 1..59: mol_type = other DNA
atggacgacgacgacaagaaactgacgctcgaggaaaaaaaaaaaaaaaaaaaaaaaaa

SEQ ID NO: 1026 - DNA, 59 bp, synthetic construct
  misc_feature 1..59: note = Description of sequence: Primer
  source 1..59: mol_type = other DNA
atggacgacgacgacaagcgaaatgtcggctcagaaaaaaaaaaaaaaaaaaaaaaaaa

SEQ ID NO: 1027 - DNA, 59 bp, synthetic construct
  misc_feature 1..59: note = Description of sequence: Primer
  source 1..59: mol_type = other DNA
atggacgacgacgacaagtccgatctcagagtttaaaaaaaaaaaaaaaaaaaaaaaaa

SEQ ID NO: 1028 - DNA, 59 bp, synthetic construct
  misc_feature 1..59: note = Description of sequence: Primer
  source 1..59: mol_type = other DNA
atggacgacgacgacaagactgcttcgagaagcgaaaaaaaaaaaaaaaaaaaaaaaaa

SEQ ID NO: 1029 - DNA, 59 bp, synthetic construct
  misc_feature 1..59: note = Description of sequence: Primer
  source 1..59: mol_type = other DNA
atggacgacgacgacaaggtgatgctgtagggcaaaaaaaaaaaaaaaaaaaaaaaaaa

SEQ ID NO: 1030 - DNA, 59 bp, synthetic construct
  misc_feature 1..59: note = Description of sequence: Primer
  source 1..59: mol_type = other DNA
atggacgacgacgacaagagtgggtatgtggtacaaaaaaaaaaaaaaaaaaaaaaaaa

SEQ ID NO: 1031 - DNA, 59 bp, synthetic construct
  misc_feature 1..59: note = Description of sequence: Primer
  source 1..59: mol_type = other DNA
atggacgacgacgacaagggagtaagttcaagcaaaaaaaaaaaaaaaaaaaaaaaaaa

SEQ ID NO: 1032 - DNA, 59 bp, synthetic construct
  misc_feature 1..59: note = Description of sequence: Primer
  source 1..59: mol_type = other DNA
atggacgacgacgacaaggagcagttttcgccgaaaaaaaaaaaaaaaaaaaaaaaaaa

SEQ ID NO: 1033 - DNA, 59 bp, synthetic construct
  misc_feature 1..59: note = Description of sequence: Primer
  source 1..59: mol_type = other DNA
atggacgacgacgacaagcgattacgagtctaggaaaaaaaaaaaaaaaaaaaaaaaaa

SEQ ID NO: 1034 - DNA, 59 bp, synthetic construct
  misc_feature 1..59: note = Description of sequence: Primer
  source 1..59: mol_type = other DNA
atggacgacgacgacaagcgcggcacttcttagaaaaaaaaaaaaaaaaaaaaaaaaaa

SEQ ID NO: 1035 - DNA, 59 bp, synthetic construct
  misc_feature 1..59: note = Description of sequence: Primer
  source 1..59: mol_type = other DNA
atggacgacgacgacaagggtgcagttcctaagaaaaaaaaaaaaaaaaaaaaaaaaaa

SEQ ID NO: 1036 - DNA, 59 bp, synthetic construct
  misc_feature 1..59: note = Description of sequence: Primer
  source 1..59: mol_type = other DNA
atggacgacgacgacaagcgtaggcattagaagaaaaaaaaaaaaaaaaaaaaaaaaaa

SEQ ID NO: 1037 - DNA, 59 bp, synthetic construct
  misc_feature 1..59: note = Description of sequence: Primer
  source 1..59: mol_type = other DNA
atggacgacgacgacaaggctatcatcagcgcctaaaaaaaaaaaaaaaaaaaaaaaaa

SEQ ID NO: 1038 - DNA, 59 bp, synthetic construct
  misc_feature 1..59: note = Description of sequence: Primer
  source 1..59: mol_type = other DNA
atggacgacgacgacaaggcgggtaggtctaaataaaaaaaaaaaaaaaaaaaaaaaaa

SEQ ID NO: 1039 - DNA, 59 bp, synthetic construct
  misc_feature 1..59: note = Description of sequence: Primer
  source 1..59: mol_type = other DNA
atggacgacgacgacaagcgtccctttgaacattaaaaaaaaaaaaaaaaaaaaaaaaa

SEQ ID NO: 1040 - DNA, 59 bp, synthetic construct
  misc_feature 1..59: note = Description of sequence: Primer
  source 1..59: mol_type = other DNA
atggacgacgacgacaagtcagactgcgagacttaaaaaaaaaaaaaaaaaaaaaaaaa

SEQ ID NO: 1041 - DNA, 59 bp, synthetic construct
  misc_feature 1..59: note = Description of sequence: Primer
  source 1..59: mol_type = other DNA
atggacgacgacgacaagtgtgttcgttatcggtaaaaaaaaaaaaaaaaaaaaaaaaa

SEQ ID NO: 1042 - DNA, 59 bp, synthetic construct
  misc_feature 1..59: note = Description of sequence: Primer
  source 1..59: mol_type = other DNA
atggacgacgacgacaagcctaacagcgtaagcaaaaaaaaaaaaaaaaaaaaaaaaaa

SEQ ID NO: 1043 - DNA, 59 bp, synthetic construct
  misc_feature 1..59: note = Description of sequence: Primer
  source 1..59: mol_type = other DNA
atggacgacgacgacaagcctgacatttccgtcaaaaaaaaaaaaaaaaaaaaaaaaaa

SEQ ID NO: 1044 - DNA, 59 bp, synthetic construct
  misc_feature 1..59: note = Description of sequence: Primer
  source 1..59: mol_type = other DNA
atggacgacgacgacaagcgaaaccatcgccaataaaaaaaaaaaaaaaaaaaaaaaaa

SEQ ID NO: 1045 - DNA, 59 bp, synthetic construct
  misc_feature 1..59: note = Description of sequence: Primer
  source 1..59: mol_type = other DNA
atggacgacgacgacaaggatcacagaagagtgcaaaaaaaaaaaaaaaaaaaaaaaaa

SEQ ID NO: 1046 - DNA, 59 bp, synthetic construct
  misc_feature 1..59: note = Description of sequence: Primer
  source 1..59: mol_type = other DNA
atggacgacgacgacaagacgatacagagcaggtaaaaaaaaaaaaaaaaaaaaaaaaa

SEQ ID NO: 1047 - DNA, 59 bp, synthetic construct
  misc_feature 1..59: note = Description of sequence: Primer
  source 1..59: mol_type = other DNA
atggacgacgacgacaaggtcaggaacgagtcttaaaaaaaaaaaaaaaaaaaaaaaaa

SEQ ID NO: 1048 - DNA, 59 bp, synthetic construct
  misc_feature 1..59: note = Description of sequence: Primer
  source 1..59: mol_type = other DNA
atggacgacgacgacaagatactgattccctgtcaaaaaaaaaaaaaaaaaaaaaaaaa

SEQ ID NO: 1049 - DNA, 59 bp, synthetic construct
  misc_feature 1..59: note = Description of sequence: Primer
  source 1..59: mol_type = other DNA
atggacgacgacgacaagttttcgccatggttgtaaaaaaaaaaaaaaaaaaaaaaaaa

SEQ ID NO: 1050 - DNA, 59 bp, synthetic construct
  misc_feature 1..59: note = Description of sequence: Primer
  source 1..59: mol_type = other DNA
atggacgacgacgacaaggttcctacgaacaactaaaaaaaaaaaaaaaaaaaaaaaaa

SEQ ID NO: 1051 - DNA, 59 bp, synthetic construct
  misc_feature 1..59: note = Description of sequence: Primer
  source 1..59: mol_type = other DNA
atggacgacgacgacaagtcgataacgctactacaaaaaaaaaaaaaaaaaaaaaaaaa

SEQ ID NO: 1052 - DNA, 59 bp, synthetic construct
  misc_feature 1..59: note = Description of sequence: Primer
  source 1..59: mol_type = other DNA
atggacgacgacgacaagtggaacacctgaagttaaaaaaaaaaaaaaaaaaaaaaaaa

SEQ ID NO: 1053 - DNA, 59 bp, synthetic construct
  misc_feature 1..59: note = Description of sequence: Primer
  source 1..59: mol_type = other DNA
atggacgacgacgacaagcacgacgtgaaactctaaaaaaaaaaaaaaaaaaaaaaaaa

SEQ ID NO: 1054 - DNA, 59 bp, synthetic construct
  misc_feature 1..59: note = Description of sequence: Primer
  source 1..59: mol_type = other DNA
atggacgacgacgacaagatccagtttcaagaggaaaaaaaaaaaaaaaaaaaaaaaaa

SEQ ID NO: 1055 - DNA, 59 bp, synthetic construct
  misc_feature 1..59: note = Description of sequence: Primer
  source 1..59: mol_type = other DNA
atggacgacgacgacaagctgcggcgatctttcaaaaaaaaaaaaaaaaaaaaaaaaaa

SEQ ID NO: 1056 - DNA, 59 bp, synthetic construct
  misc_feature 1..59: note = Description of sequence: Primer
  source 1..59: mol_type = other DNA
atggacgacgacgacaagcggacttgacttccagaaaaaaaaaaaaaaaaaaaaaaaaa

SEQ ID NO: 1057 - DNA, 59 bp, synthetic construct
  misc_feature 1..59: note = Description of sequence: Primer
  source 1..59: mol_type = other DNA
atggacgacgacgacaaggtgtgaatgcataagcaaaaaaaaaaaaaaaaaaaaaaaaa

SEQ ID NO: 1058 - DNA, 59 bp, synthetic construct
  misc_feature 1..59: note = Description of sequence: Primer
  source 1..59: mol_type = other DNA
atggacgacgacgacaagtcaccgtgttaggtcaaaaaaaaaaaaaaaaaaaaaaaaaa

SEQ ID NO: 1059 - DNA, 59 bp, synthetic construct
  misc_feature 1..59: note = Description of sequence: Primer
  source 1..59: mol_type = other DNA
atggacgacgacgacaagggcatgattgtcgcacaaaaaaaaaaaaaaaaaaaaaaaaa

SEQ ID NO: 1060 - DNA, 59 bp, synthetic construct
  misc_feature 1..59: note = Description of sequence: Primer
  source 1..59: mol_type = other DNA
atggacgacgacgacaaggcctagggacacgattaaaaaaaaaaaaaaaaaaaaaaaaa

SEQ ID NO: 1061 - DNA, 59 bp, synthetic construct
  misc_feature 1..59: note = Description of sequence: Primer
  source 1..59: mol_type = other DNA
atggacgacgacgacaagacagtccaccatgatcaaaaaaaaaaaaaaaaaaaaaaaaa

SEQ ID NO: 1062 - DNA, 59 bp, synthetic construct
  misc_feature 1..59: note = Description of sequence: Primer
  source 1..59: mol_type = other DNA
atggacgacgacgacaagcaaccagtatagaagcaaaaaaaaaaaaaaaaaaaaaaaaa

SEQ ID NO: 1063 - DNA, 59 bp, synthetic construct
  misc_feature 1..59: note = Description of sequence: Primer
  source 1..59: mol_type = other DNA
atggacgacgacgacaagtgtaactcacgggttaaaaaaaaaaaaaaaaaaaaaaaaaa

SEQ ID NO: 1064 - DNA, 59 bp, synthetic construct
  misc_feature 1..59: note = Description of sequence: Primer
  source 1..59: mol_type = other DNA
atggacgacgacgacaagatagacccttggccctaaaaaaaaaaaaaaaaaaaaaaaaa

SEQ ID NO: 1065 - DNA, 59 bp, synthetic construct
  misc_feature 1..59: note = Description of sequence: Primer
  source 1..59: mol_type = other DNA
atggacgacgacgacaagctgtgtatgccctttgaaaaaaaaaaaaaaaaaaaaaaaaa

SEQ ID NO: 1066 - DNA, 59 bp, synthetic construct
  misc_feature 1..59: note = Description of sequence: Primer
  source 1..59: mol_type = other DNA
atggacgacgacgacaagatcccaaacttagtgcaaaaaaaaaaaaaaaaaaaaaaaaa

SEQ ID NO: 1067 - DNA, 59 bp, synthetic construct
  misc_feature 1..59: note = Description of sequence: Primer
  source 1..59: mol_type = other DNA
atggacgacgacgacaagtcttattacgcccggaaaaaaaaaaaaaaaaaaaaaaaaaa

SEQ ID NO: 1068 - DNA, 59 bp, synthetic construct
  misc_feature 1..59: note = Description of sequence: Primer
  source 1..59: mol_type = other DNA
atggacgacgacgacaagacgaatagtgcgccacaaaaaaaaaaaaaaaaaaaaaaaaa

SEQ ID NO: 1069 - DNA, 59 bp, synthetic construct
  misc_feature 1..59: note = Description of sequence: Primer
  source 1..59: mol_type = other DNA
atggacgacgacgacaagatgcactgatgatgcgaaaaaaaaaaaaaaaaaaaaaaaaa

SEQ ID NO: 1070 - DNA, 59 bp, synthetic construct
  misc_feature 1..59: note = Description of sequence: Primer
  source 1..59: mol_type = other DNA
atggacgacgacgacaagggtaaagtgtcccaagaaaaaaaaaaaaaaaaaaaaaaaaa

SEQ ID NO: 1071 - DNA, 59 bp, synthetic construct
  misc_feature 1..59: note = Description of sequence: Primer
  source 1..59: mol_type = other DNA
atggacgacgacgacaagggaagaactagtcccgaaaaaaaaaaaaaaaaaaaaaaaaa

SEQ ID NO: 1072 - DNA, 59 bp, synthetic construct
  misc_feature 1..59: note = Description of sequence: Primer
  source 1..59: mol_type = other DNA
atggacgacgacgacaagtagccagatgaaatggaaaaaaaaaaaaaaaaaaaaaaaaa

SEQ ID NO: 1073 - DNA, 59 bp, synthetic construct
  misc_feature 1..59: note = Description of sequence: Primer
  source 1..59: mol_type = other DNA
atggacgacgacgacaagacgacacaatgattccaaaaaaaaaaaaaaaaaaaaaaaaa

SEQ ID NO: 1074 - DNA, 59 bp, synthetic construct
  misc_feature 1..59: note = Description of sequence: Primer
  source 1..59: mol_type = other DNA
atggacgacgacgacaagccatgtgaaagccaggaaaaaaaaaaaaaaaaaaaaaaaaa

SEQ ID NO: 1075 - DNA, 59 bp, synthetic construct
  misc_feature 1..59: note = Description of sequence: Primer
  source 1..59: mol_type = other DNA
atggacgacgacgacaagagggtagaacctcattaaaaaaaaaaaaaaaaaaaaaaaaa

SEQ ID NO: 1076 - DNA, 59 bp, synthetic construct
  misc_feature 1..59: note = Description of sequence: Primer
  source 1..59: mol_type = other DNA
atggacgacgacgacaagaacagaaacccgaagaaaaaaaaaaaaaaaaaaaaaaaaaa

SEQ ID NO: 1077 - DNA, 59 bp, synthetic construct
  misc_feature 1..59: note = Description of sequence: Primer
  source 1..59: mol_type = other DNA
atggacgacgacgacaagtgggtcggaaatttacaaaaaaaaaaaaaaaaaaaaaaaaa

SEQ ID NO: 1078 - DNA, 59 bp, synthetic construct
  misc_feature 1..59: note = Description of sequence: Primer
  source 1..59: mol_type = other DNA
atggacgacgacgacaagccgcagcatacaatccaaaaaaaaaaaaaaaaaaaaaaaaa

SEQ ID NO: 1079 - DNA, 59 bp, synthetic construct
  misc_feature 1..59: note = Description of sequence: Primer
  source 1..59: mol_type = other DNA
atggacgacgacgacaagatccagacaacgttgaaaaaaaaaaaaaaaaaaaaaaaaaa

SEQ ID NO: 1080 - DNA, 59 bp, synthetic construct
  misc_feature 1..59: note = Description of sequence: Primer
  source 1..59: mol_type = other DNA
atggacgacgacgacaagcaaatggcacgcccttaaaaaaaaaaaaaaaaaaaaaaaaa

SEQ ID NO: 1081 - DNA, 59 bp, synthetic construct
  misc_feature 1..59: note = Description of sequence: Primer
  source 1..59: mol_type = other DNA
atggacgacgacgacaagccactcatatacgggtaaaaaaaaaaaaaaaaaaaaaaaaa

SEQ ID NO: 1082 - DNA, 59 bp, synthetic construct
  misc_feature 1..59: note = Description of sequence: Primer
  source 1..59: mol_type = other DNA
atggacgacgacgacaagttgaccgtagaatgtgaaaaaaaaaaaaaaaaaaaaaaaaa

SEQ ID NO: 1083 - DNA, 59 bp, synthetic construct
  misc_feature 1..59: note = Description of sequence: Primer
  source 1..59: mol_type = other DNA
atggacgacgacgacaagtttcatcggccagtggaaaaaaaaaaaaaaaaaaaaaaaaa

SEQ ID NO: 1084 - DNA, 59 bp, synthetic construct
  misc_feature 1..59: note = Description of sequence: Primer
  source 1..59: mol_type = other DNA
atggacgacgacgacaagacgtacccggtagacaaaaaaaaaaaaaaaaaaaaaaaaaa

SEQ ID NO: 1085 - DNA, 59 bp, synthetic construct
  misc_feature 1..59: note = Description of sequence: Primer
  source 1..59: mol_type = other DNA
atggacgacgacgacaaggcagggtggaacctataaaaaaaaaaaaaaaaaaaaaaaaa

SEQ ID NO: 1086 - DNA, 59 bp, synthetic construct
  misc_feature 1..59: note = Description of sequence: Primer
  source 1..59: mol_type = other DNA
atggacgacgacgacaagacgtatttattccgccaaaaaaaaaaaaaaaaaaaaaaaaa

SEQ ID NO: 1087 - DNA, 59 bp, synthetic construct
  misc_feature 1..59: note = Description of sequence: Primer
  source 1..59: mol_type = other DNA
atggacgacgacgacaagtgtggtcactcggaataaaaaaaaaaaaaaaaaaaaaaaaa

SEQ ID NO: 1088 - DNA, 59 bp, synthetic construct
  misc_feature 1..59: note = Description of sequence: Primer
  source 1..59: mol_type = other DNA
atggacgacgacgacaagctggcatgttgtaggtaaaaaaaaaaaaaaaaaaaaaaaaa

SEQ ID NO: 1089 - DNA, 59 bp, synthetic construct
  misc_feature 1..59: note = Description of sequence: Primer
  source 1..59: mol_type = other DNA
atggacgacgacgacaagttaggcaggtgcattgaaaaaaaaaaaaaaaaaaaaaaaaa

SEQ ID NO: 1090 - DNA, 59 bp, synthetic construct
  misc_feature 1..59: note = Description of sequence: Primer
  source 1..59: mol_type = other DNA
atggacgacgacgacaagccagaggaaatggggaaaaaaaaaaaaaaaaaaaaaaaaaa

SEQ ID NO: 1091 - DNA, 59 bp, synthetic construct
  misc_feature 1..59: note = Description of sequence: Primer
  source 1..59: mol_type = other DNA
atggacgacgacgacaagtgtcaacgcatgaaagaaaaaaaaaaaaaaaaaaaaaaaaa

SEQ ID NO: 1092 - DNA, 59 bp, synthetic construct
  misc_feature 1..59: note = Description of sequence: Primer
  source 1..59: mol_type = other DNA
atggacgacgacgacaagcgtttcaatgcagggtaaaaaaaaaaaaaaaaaaaaaaaaa

SEQ ID NO: 1093 - DNA, 59 bp, synthetic construct
  misc_feature 1..59: note = Description of sequence: Primer
  source 1..59: mol_type = other DNA
atggacgacgacgacaaggaccccggtaagtttaaaaaaaaaaaaaaaaaaaaaaaaaa

SEQ ID NO: 1094 - DNA, 59 bp, synthetic construct
  misc_feature 1..59: note = Description of sequence: Primer
  source 1..59: mol_type = other DNA
atggacgacgacgacaagctcattacggacagtgaaaaaaaaaaaaaaaaaaaaaaaaa

SEQ ID NO: 1095 - DNA, 59 bp, synthetic construct
  misc_feature 1..59: note = Description of sequence: Primer
  source 1..59: mol_type = other DNA
atggacgacgacgacaaggggccattagtagtgtaaaaaaaaaaaaaaaaaaaaaaaaa

SEQ ID NO: 1096 - DNA, 59 bp, synthetic construct
  misc_feature 1..59: note = Description of sequence: Primer
  source 1..59: mol_type = other DNA
atggacgacgacgacaagttacacctgggaatccaaaaaaaaaaaaaaaaaaaaaaaaa

SEQ ID NO: 1097 - DNA, 59 bp, synthetic construct
  misc_feature 1..59: note = Description of sequence: Primer
  source 1..59: mol_type = other DNA
atggacgacgacgacaagctctaccttagtggcgaaaaaaaaaaaaaaaaaaaaaaaaa

SEQ ID NO: 1098 - DNA, 59 bp, synthetic construct
  misc_feature 1..59: note = Description of sequence: Primer
  source 1..59: mol_type = other DNA
atggacgacgacgacaaggaattgcggtatcgtcaaaaaaaaaaaaaaaaaaaaaaaaa

SEQ ID NO: 1099 - DNA, 59 bp, synthetic construct
  misc_feature 1..59: note = Description of sequence: Primer
  source 1..59: mol_type = other DNA
atggacgacgacgacaaggcctcaacgcaacacaaaaaaaaaaaaaaaaaaaaaaaaaa

SEQ ID NO: 1100 - DNA, 59 bp, synthetic construct
  misc_feature 1..59: note = Description of sequence: Primer
  source 1..59: mol_type = other DNA
atggacgacgacgacaagagcgactacagctgagaaaaaaaaaaaaaaaaaaaaaaaaa

SEQ ID NO: 1101 - DNA, 59 bp, synthetic construct
  misc_feature 1..59: note = Description of sequence: Primer
  source 1..59: mol_type = other DNA
atggacgacgacgacaagacacacgcaaaacagtaaaaaaaaaaaaaaaaaaaaaaaaa

SEQ ID NO: 1102 - DNA, 59 bp, synthetic construct
  misc_feature 1..59: note = Description of sequence: Primer
  source 1..59: mol_type = other DNA
atggacgacgacgacaaggactaagctgcaatccaaaaaaaaaaaaaaaaaaaaaaaaa

SEQ ID NO: 1103 - DNA, 59 bp, synthetic construct
  misc_feature 1..59: note = Description of sequence: Primer
  source 1..59: mol_type = other DNA
atggacgacgacgacaagcatacggcgatcttagaaaaaaaaaaaaaaaaaaaaaaaaa

SEQ ID NO: 1104 - DNA, 59 bp, synthetic construct
  misc_feature 1..59: note = Description of sequence: Primer
  source 1..59: mol_type = other DNA
atggacgacgacgacaagtatcgtcctatgttcgaaaaaaaaaaaaaaaaaaaaaaaaa

SEQ ID NO: 1105 - DNA, 59 bp, synthetic construct
  misc_feature 1..59: note = Description of sequence: Primer
  source 1..59: mol_type = other DNA
atggacgacgacgacaagtaggtccttgggaatgaaaaaaaaaaaaaaaaaaaaaaaaa

SEQ ID NO: 1106 - DNA, 59 bp, synthetic construct
  misc_feature 1..59: note = Description of sequence: Primer
  source 1..59: mol_type = other DNA
atggacgacgacgacaagctgagactagcactacaaaaaaaaaaaaaaaaaaaaaaaaa

SEQ ID NO: 1107 - DNA, 59 bp, synthetic construct
  misc_feature 1..59: note = Description of sequence: Primer
  source 1..59: mol_type = other DNA
atggacgacgacgacaaggcgtttgagcatccataaaaaaaaaaaaaaaaaaaaaaaaa

SEQ ID NO: 1108 - DNA, 59 bp, synthetic construct
  misc_feature 1..59: note = Description of sequence: Primer
  source 1..59: mol_type = other DNA
atggacgacgacgacaagtaacccaacgcaacctaaaaaaaaaaaaaaaaaaaaaaaaa

SEQ ID NO: 1109 - DNA, 59 bp, synthetic construct
  misc_feature 1..59: note = Description of sequence: Primer
  source 1..59: mol_type = other DNA
atggacgacgacgacaagggagttacgcatctggaaaaaaaaaaaaaaaaaaaaaaaaa

SEQ ID NO: 1110 - DNA, 59 bp, synthetic construct
  misc_feature 1..59: note = Description of sequence: Primer
  source 1..59: mol_type = other DNA
atggacgacgacgacaagtttgggctcggcctataaaaaaaaaaaaaaaaaaaaaaaaa

SEQ ID NO: 1111 - DNA, 59 bp, synthetic construct
  misc_feature 1..59: note = Description of sequence: Primer
  source 1..59: mol_type = other DNA
atggacgacgacgacaagatgatgagtggaagggaaaaaaaaaaaaaaaaaaaaaaaaa

SEQ ID NO: 1112 - DNA, 59 bp, synthetic construct
  misc_feature 1..59: note = Description of sequence: Primer
  source 1..59: mol_type = other DNA
atggacgacgacgacaaggtcagagcactcaaataaaaaaaaaaaaaaaaaaaaaaaaa

SEQ ID NO: 1113 - DNA, 59 bp, synthetic construct
  misc_feature 1..59: note = Description of sequence: Primer
  source 1..59: mol_type = other DNA
atggacgacgacgacaagtgcaagaaacaggcagaaaaaaaaaaaaaaaaaaaaaaaaa

SEQ ID NO: 1114 - DNA, 59 bp, synthetic construct
  misc_feature 1..59: note = Description of sequence: Primer
  source 1..59: mol_type = other DNA
atggacgacgacgacaagatggcgttcaggcttcaaaaaaaaaaaaaaaaaaaaaaaaa

SEQ ID NO: 1115 - DNA, 59 bp, synthetic construct
  misc_feature 1..59: note = Description of sequence: Primer
  source 1..59: mol_type = other DNA
atggacgacgacgacaaggtttagtcgcgatagcaaaaaaaaaaaaaaaaaaaaaaaaa

SEQ ID NO: 1116 - DNA, 59 bp, synthetic construct
  misc_feature 1..59: note = Description of sequence: Primer
  source 1..59: mol_type = other DNA
atggacgacgacgacaagcgcagacccaatgcataaaaaaaaaaaaaaaaaaaaaaaaa

SEQ ID NO: 1117 - DNA, 59 bp, synthetic construct
  misc_feature 1..59: note = Description of sequence: Primer
  source 1..59: mol_type = other DNA
atggacgacgacgacaagtgaaatagtagcgaccaaaaaaaaaaaaaaaaaaaaaaaaa

SEQ ID NO: 1118 - DNA, 59 bp, synthetic construct
  misc_feature 1..59: note = Description of sequence: Primer
  source 1..59: mol_type = other DNA
atggacgacgacgacaagcatcgccggctaaatcaaaaaaaaaaaaaaaaaaaaaaaaa

SEQ ID NO: 1119 - DNA, 59 bp, synthetic construct
  misc_feature 1..59: note = Description of sequence: Primer
  source 1..59: mol_type = other DNA
atggacgacgacgacaagatgtacgggctctctcaaaaaaaaaaaaaaaaaaaaaaaaa

SEQ ID NO: 1120 - DNA, 59 bp, synthetic construct
  misc_feature 1..59: note = Description of sequence: Primer
  source 1..59: mol_type = other DNA
atggacgacgacgacaagccccgttaacatatggaaaaaaaaaaaaaaaaaaaaaaaaa

SEQ ID NO: 1121 - DNA, 59 bp, synthetic construct
  misc_feature 1..59: note = Description of sequence: Primer
  source 1..59: mol_type = other DNA
atggacgacgacgacaaggactcgttggcgctataaaaaaaaaaaaaaaaaaaaaaaaa

SEQ ID NO: 1122 - DNA, 59 bp, synthetic construct
  misc_feature 1..59: note = Description of sequence: Primer
  source 1..59: mol_type = other DNA
atggacgacgacgacaaggcccagacctttaggaaaaaaaaaaaaaaaaaaaaaaaaaa

SEQ ID NO: 1123 - DNA, 59 bp, synthetic construct
  misc_feature 1..59: note = Description of sequence: Primer
  source 1..59: mol_type = other DNA
atggacgacgacgacaagtcccaacaattaccctaaaaaaaaaaaaaaaaaaaaaaaaa

SEQ ID NO: 1124 - DNA, 59 bp, synthetic construct
  misc_feature 1..59: note = Description of sequence: Primer
  source 1..59: mol_type = other DNA
atggacgacgacgacaagcctgtgtgcatctgctaaaaaaaaaaaaaaaaaaaaaaaaa

SEQ ID NO: 1125 - DNA, 59 bp, synthetic construct
  misc_feature 1..59: note = Description of sequence: Primer
  source 1..59: mol_type = other DNA
atggacgacgacgacaagggccgttccttggtaaaaaaaaaaaaaaaaaaaaaaaaaaa

SEQ ID NO: 1126 - DNA, 59 bp, synthetic construct
  misc_feature 1..59: note = Description of sequence: Primer
  source 1..59: mol_type = other DNA
atggacgacgacgacaagagagtaggttgtgttgaaaaaaaaaaaaaaaaaaaaaaaaa

SEQ ID NO: 1127 - DNA, 59 bp, synthetic construct
  misc_feature 1..59: note = Description of sequence: Primer
  source 1..59: mol_type = other DNA
atggacgacgacgacaagactcgataataggacgaaaaaaaaaaaaaaaaaaaaaaaaa

SEQ ID NO: 1128 - DNA, 59 bp, synthetic construct
  misc_feature 1..59: note = Description of sequence: Primer
  source 1..59: mol_type = other DNA
atggacgacgacgacaagcccgacgaatggttataaaaaaaaaaaaaaaaaaaaaaaaa

SEQ ID NO: 1129 - DNA, 59 bp, synthetic construct
  misc_feature 1..59: note = Description of sequence: Primer
  source 1..59: mol_type = other DNA
atggacgacgacgacaagcgaccgaatcattcccaaaaaaaaaaaaaaaaaaaaaaaaa

SEQ ID NO: 1130 - DNA, 59 bp, synthetic construct
  misc_feature 1..59: note = Description of sequence: Primer
  source 1..59: mol_type = other DNA
atggacgacgacgacaaggcctgtagactttgcaaaaaaaaaaaaaaaaaaaaaaaaaa

SEQ ID NO: 1131 - DNA, 59 bp, synthetic construct
  misc_feature 1..59: note = Description of sequence: Primer
  source 1..59: mol_type = other DNA
atggacgacgacgacaagggatccaatacacctaaaaaaaaaaaaaaaaaaaaaaaaaa

SEQ ID NO: 1132 - DNA, 59 bp, synthetic construct
  misc_feature 1..59: note = Description of sequence: Primer
  source 1..59: mol_type = other DNA
atggacgacgacgacaaggggagcgaattgtggaaaaaaaaaaaaaaaaaaaaaaaaaa

SEQ ID NO: 1133 - DNA, 59 bp, synthetic construct
  misc_feature 1..59: note = Description of sequence: Primer
  source 1..59: mol_type = other DNA
atggacgacgacgacaagcgaccttacggcatgaaaaaaaaaaaaaaaaaaaaaaaaaa

SEQ ID NO: 1134 - DNA, 59 bp, synthetic construct
  misc_feature 1..59: note = Description of sequence: Primer
  source 1..59: mol_type = other DNA
atggacgacgacgacaagccgtcacttacgtataaaaaaaaaaaaaaaaaaaaaaaaaa

SEQ ID NO: 1135 - DNA, 59 bp, synthetic construct
  misc_feature 1..59: note = Description of sequence: Primer
  source 1..59: mol_type = other DNA
atggacgacgacgacaagcgcagtttcacgtaacaaaaaaaaaaaaaaaaaaaaaaaaa

SEQ ID NO: 1136 - DNA, 59 bp, synthetic construct
  misc_feature 1..59: note = Description of sequence: Primer
  source 1..59: mol_type = other DNA
atggacgacgacgacaagggcaagctgaatctacaaaaaaaaaaaaaaaaaaaaaaaaa

SEQ ID NO: 1137 - DNA, 59 bp, synthetic construct
  misc_feature 1..59: note = Description of sequence: Primer
  source 1..59: mol_type = other DNA
atggacgacgacgacaagtgcggctacattgccaaaaaaaaaaaaaaaaaaaaaaaaaa

SEQ ID NO: 1138 - DNA, 59 bp, synthetic construct
  misc_feature 1..59: note = Description of sequence: Primer
  source 1..59: mol_type = other DNA
atggacgacgacgacaagatcttctcagtcttcgaaaaaaaaaaaaaaaaaaaaaaaaa

SEQ ID NO: 1139 - DNA, 59 bp, synthetic construct
  misc_feature 1..59: note = Description of sequence: Primer
  source 1..59: mol_type = other DNA
atggacgacgacgacaaggcaggaagatagtcgtaaaaaaaaaaaaaaaaaaaaaaaaa

SEQ ID NO: 1140 - DNA, 59 bp, synthetic construct
  misc_feature 1..59: note = Description of sequence: Primer
  source 1..59: mol_type = other DNA
atggacgacgacgacaaggtgatgtgtctgatacaaaaaaaaaaaaaaaaaaaaaaaaa

SEQ ID NO: 1141 - DNA, 59 bp, synthetic construct
  misc_feature 1..59: note = Description of sequence: Primer
  source 1..59: mol_type = other DNA
atggacgacgacgacaagcgtagccaaagtcgtgaaaaaaaaaaaaaaaaaaaaaaaaa

SEQ ID NO: 1142 - DNA, 59 bp, synthetic construct
  misc_feature 1..59: note = Description of sequence: Primer
  source 1..59: mol_type = other DNA
atggacgacgacgacaagacttcacggaactacgaaaaaaaaaaaaaaaaaaaaaaaaa

SEQ ID NO: 1143 - DNA, 59 bp, synthetic construct
  misc_feature 1..59: note = Description of sequence: Primer
  source 1..59: mol_type = other DNA
atggacgacgacgacaagcgacaaggtatcagttaaaaaaaaaaaaaaaaaaaaaaaaa

SEQ ID NO: 1144 - DNA, 59 bp, synthetic construct
  misc_feature 1..59: note = Description of sequence: Primer
  source 1..59: mol_type = other DNA
atggacgacgacgacaaggtatctagggaagtccaaaaaaaaaaaaaaaaaaaaaaaaa

SEQ ID NO: 1145 - DNA, 59 bp, synthetic construct
  misc_feature 1..59: note = Description of sequence: Primer
  source 1..59: mol_type = other DNA
atggacgacgacgacaagaagtcagcgaggcgttaaaaaaaaaaaaaaaaaaaaaaaaa

SEQ ID NO: 1146 - DNA, 59 bp, synthetic construct
  misc_feature 1..59: note = Description of sequence: Primer
  source 1..59: mol_type = other DNA
atggacgacgacgacaagcgtgtgaccatgatgaaaaaaaaaaaaaaaaaaaaaaaaaa

SEQ ID NO: 1147 - DNA, 59 bp, synthetic construct
  misc_feature 1..59: note = Description of sequence: Primer
  source 1..59: mol_type = other DNA
atggacgacgacgacaagacaaagctttcaggctaaaaaaaaaaaaaaaaaaaaaaaaa

SEQ ID NO: 1148 - DNA, 59 bp, synthetic construct
  misc_feature 1..59: note = Description of sequence: Primer
  source 1..59: mol_type = other DNA
atggacgacgacgacaagttagtcgtcacatcgcaaaaaaaaaaaaaaaaaaaaaaaaa

SEQ ID NO: 1149 - DNA, 59 bp, synthetic construct
  misc_feature 1..59: note = Description of sequence: Primer
  source 1..59: mol_type = other DNA
atggacgacgacgacaagctagaacatgcttcgtaaaaaaaaaaaaaaaaaaaaaaaaa

SEQ ID NO: 1150 - DNA, 59 bp, synthetic construct
  misc_feature 1..59: note = Description of sequence: Primer
  source 1..59: mol_type = other DNA
atggacgacgacgacaagagaaacaacgtcaaggaaaaaaaaaaaaaaaaaaaaaaaaa

SEQ ID NO: 1151 - DNA, 59 bp, synthetic construct
  misc_feature 1..59: note = Description of sequence: Primer
  source 1..59: mol_type = other DNA
atggacgacgacgacaagtctgtactagctgcacaaaaaaaaaaaaaaaaaaaaaaaaa

SEQ ID NO: 1152 - DNA, 59 bp, synthetic construct
  misc_feature 1..59: note = Description of sequence: Primer
  source 1..59: mol_type = other DNA
atggacgacgacgacaagtgcgcattgatggttgaaaaaaaaaaaaaaaaaaaaaaaaa

SEQ ID NO: 1153 - DNA, 59 bp, synthetic construct
  misc_feature 1..59: note = Description of sequence: Primer
  source 1..59: mol_type = other DNA
atggacgacgacgacaagtctacccgactttcccaaaaaaaaaaaaaaaaaaaaaaaaa

SEQ ID NO: 1154 - DNA, 59 bp, synthetic construct
  misc_feature 1..59: note = Description of sequence: Primer
  source 1..59: mol_type = other DNA
atggacgacgacgacaagtcgcttgtttgcttcaaaaaaaaaaaaaaaaaaaaaaaaaa

SEQ ID NO: 1155 - DNA, 59 bp, synthetic construct
  misc_feature 1..59: note = Description of sequence: Primer
  source 1..59: mol_type = other DNA
atggacgacgacgacaagccggtcaagcagtacaaaaaaaaaaaaaaaaaaaaaaaaaa

SEQ ID NO: 1156 - DNA, 59 bp, synthetic construct
  misc_feature 1..59: note = Description of sequence: Primer
  source 1..59: mol_type = other DNA
atggacgacgacgacaagttctttgaggcactagaaaaaaaaaaaaaaaaaaaaaaaaa

SEQ ID NO: 1157 - DNA, 59 bp, synthetic construct
  misc_feature 1..59: note = Description of sequence: Primer
  source 1..59: mol_type = other DNA
atggacgacgacgacaagaaaagcacagttgcctaaaaaaaaaaaaaaaaaaaaaaaaa

SEQ ID NO: 1158 - DNA, 59 bp, synthetic construct
  misc_feature 1..59: note = Description of sequence: Primer
  source 1..59: mol_type = other DNA
atggacgacgacgacaagcttctacctcgaggataaaaaaaaaaaaaaaaaaaaaaaaa

SEQ ID NO: 1159 - DNA, 59 bp, synthetic construct
  misc_feature 1..59: note = Description of sequence: Primer
  source 1..59: mol_type = other DNA
atggacgacgacgacaagggttccaaccttatcaaaaaaaaaaaaaaaaaaaaaaaaaa

SEQ ID NO: 1160 - DNA, 59 bp, synthetic construct
  misc_feature 1..59: note = Description of sequence: Primer
  source 1..59: mol_type = other DNA
atggacgacgacgacaagctatgaccgggtgttcaaaaaaaaaaaaaaaaaaaaaaaaa

SEQ ID NO: 1161 - DNA, 59 bp, synthetic construct
  misc_feature 1..59: note = Description of sequence: Primer
  source 1..59: mol_type = other DNA
atggacgacgacgacaaggagatcaggagttctaaaaaaaaaaaaaaaaaaaaaaaaaa

SEQ ID NO: 1162 - DNA, 59 bp, synthetic construct
  misc_feature 1..59: note = Description of sequence: Primer
  source 1..59: mol_type = other DNA
atggacgacgacgacaagcggagatctgcagactaaaaaaaaaaaaaaaaaaaaaaaaa

SEQ ID NO: 1163 - DNA, 59 bp, synthetic construct
  misc_feature 1..59: note = Description of sequence: Primer
  source 1..59: mol_type = other DNA
atggacgacgacgacaagtcttgcgatatgtctcaaaaaaaaaaaaaaaaaaaaaaaaa

SEQ ID NO: 1164 - DNA, 59 bp, synthetic construct
  misc_feature 1..59: note = Description of sequence: Primer
  source 1..59: mol_type = other DNA
atggacgacgacgacaagctgtaacaactcggttaaaaaaaaaaaaaaaaaaaaaaaaa

SEQ ID NO: 1165 - DNA, 59 bp, synthetic construct
  misc_feature 1..59: note = Description of sequence: Primer
  source 1..59: mol_type = other DNA
atggacgacgacgacaagggttacacgacttgctaaaaaaaaaaaaaaaaaaaaaaaaa

SEQ ID NO: 1166 - DNA, 59 bp, synthetic construct
  misc_feature 1..59: note = Description of sequence: Primer
  source 1..59: mol_type = other DNA
atggacgacgacgacaagagagggaacattcgtcaaaaaaaaaaaaaaaaaaaaaaaaa

SEQ ID NO: 1167 - DNA, 59 bp, synthetic construct
  misc_feature 1..59: note = Description of sequence: Primer
  source 1..59: mol_type = other DNA
atggacgacgacgacaaggggtattgaacaaacgaaaaaaaaaaaaaaaaaaaaaaaaa

SEQ ID NO: 1168 - DNA, 59 bp, synthetic construct
  misc_feature 1..59: note = Description of sequence: Primer
  source 1..59: mol_type = other DNA
atggacgacgacgacaagagtgccagactggcaaaaaaaaaaaaaaaaaaaaaaaaaaa

SEQ ID NO: 1169 - DNA, 59 bp, synthetic construct
  misc_feature 1..59: note = Description of sequence: Primer
  source 1..59: mol_type = other DNA
atggacgacgacgacaagggtagatgacgaggagaaaaaaaaaaaaaaaaaaaaaaaaa

SEQ ID NO: 1170 - DNA, 59 bp, synthetic construct
  misc_feature 1..59: note = Description of sequence: Primer
  source 1..59: mol_type = other DNA
atggacgacgacgacaagcgtcaattctcagccgaaaaaaaaaaaaaaaaaaaaaaaaa

SEQ ID NO: 1171 - DNA, 59 bp, synthetic construct
  misc_feature 1..59: note = Description of sequence: Primer
  source 1..59: mol_type = other DNA
atggacgacgacgacaagacgggagtaagtgtcaaaaaaaaaaaaaaaaaaaaaaaaaa

SEQ ID NO: 1172 - DNA, 59 bp, synthetic construct
  misc_feature 1..59: note = Description of sequence: Primer
  source 1..59: mol_type = other DNA
atggacgacgacgacaagaacacttccagtgtcaaaaaaaaaaaaaaaaaaaaaaaaaa

SEQ ID NO: 1173 - DNA, 59 bp, synthetic construct
  misc_feature 1..59: note = Description of sequence: Primer
  source 1..59: mol_type = other DNA
atggacgacgacgacaagcatggcggccatttcaaaaaaaaaaaaaaaaaaaaaaaaaa

SEQ ID NO: 1174 - DNA, 59 bp, synthetic construct
  misc_feature 1..59: note = Description of sequence: Primer
  source 1..59: mol_type = other DNA
atggacgacgacgacaaggctgatctggattgccaaaaaaaaaaaaaaaaaaaaaaaaa

SEQ ID NO: 1175 - DNA, 59 bp, synthetic construct
  misc_feature 1..59: note = Description of sequence: Primer
  source 1..59: mol_type = other DNA
atggacgacgacgacaagcgttaagtgcggtcctaaaaaaaaaaaaaaaaaaaaaaaaa

SEQ ID NO: 1176 - DNA, 59 bp, synthetic construct
  misc_feature 1..59: note = Description of sequence: Primer
  source 1..59: mol_type = other DNA
atggacgacgacgacaaggcccatagtgaaacggaaaaaaaaaaaaaaaaaaaaaaaaa

SEQ ID NO: 1177 - DNA, 59 bp, synthetic construct
  misc_feature 1..59: note = Description of sequence: Primer
  source 1..59: mol_type = other DNA
atggacgacgacgacaagcagaataggcaagcttaaaaaaaaaaaaaaaaaaaaaaaaa

SEQ ID NO: 1178 - DNA, 59 bp, synthetic construct
  misc_feature 1..59: note = Description of sequence: Primer
  source 1..59: mol_type = other DNA
atggacgacgacgacaagtcatcgcacgactgttaaaaaaaaaaaaaaaaaaaaaaaaa

SEQ ID NO: 1179 - DNA, 59 bp, synthetic construct
  misc_feature 1..59: note = Description of sequence: Primer
  source 1..59: mol_type = other DNA
atggacgacgacgacaagtccacacttgctagggaaaaaaaaaaaaaaaaaaaaaaaaa

SEQ ID NO: 1180 - DNA, 59 bp, synthetic construct
  misc_feature 1..59: note = Description of sequence: Primer
  source 1..59: mol_type = other DNA
atggacgacgacgacaagtaataatagcacgcccaaaaaaaaaaaaaaaaaaaaaaaaa

SEQ ID NO: 1181 - DNA, 59 bp, synthetic construct
  misc_feature 1..59: note = Description of sequence: Primer
  source 1..59: mol_type = other DNA
atggacgacgacgacaaggttcaacgccgcttacaaaaaaaaaaaaaaaaaaaaaaaaa

SEQ ID NO: 1182 - DNA, 59 bp, synthetic construct
  misc_feature 1..59: note = Description of sequence: Primer
  source 1..59: mol_type = other DNA
atggacgacgacgacaagtcgagctattcccataaaaaaaaaaaaaaaaaaaaaaaaaa

SEQ ID NO: 1183 - DNA, 59 bp, synthetic construct
  misc_feature 1..59: note = Description of sequence: Primer
  source 1..59: mol_type = other DNA
atggacgacgacgacaagtcccagtctggacatcaaaaaaaaaaaaaaaaaaaaaaaaa

SEQ ID NO: 1184 - DNA, 59 bp, synthetic construct
  misc_feature 1..59: note = Description of sequence: Primer
  source 1..59: mol_type = other DNA
atggacgacgacgacaagccgagatcaaacttcgaaaaaaaaaaaaaaaaaaaaaaaaa

SEQ ID NO: 1185 - DNA, 59 bp, synthetic construct
  misc_feature 1..59: note = Description of sequence: Primer
  source 1..59: mol_type = other DNA
atggacgacgacgacaagacgctctaatcgtcgcaaaaaaaaaaaaaaaaaaaaaaaaa

SEQ ID NO: 1186 - DNA, 59 bp, synthetic construct
  misc_feature 1..59: note = Description of sequence: Primer
  source 1..59: mol_type = other DNA
atggacgacgacgacaagggtgttaacgagaacgaaaaaaaaaaaaaaaaaaaaaaaaa

SEQ ID NO: 1187 - DNA, 59 bp, synthetic construct
  misc_feature 1..59: note = Description of sequence: Primer
  source 1..59: mol_type = other DNA
atggacgacgacgacaagctctatacgggtcagaaaaaaaaaaaaaaaaaaaaaaaaaa

SEQ ID NO: 1188 - DNA, 59 bp, synthetic construct
  misc_feature 1..59: note = Description of sequence: Primer
  source 1..59: mol_type = other DNA
atggacgacgacgacaagcatctcccctgtcattaaaaaaaaaaaaaaaaaaaaaaaaa

SEQ ID NO: 1189 - DNA, 59 bp, synthetic construct
  misc_feature 1..59: note = Description of sequence: Primer
  source 1..59: mol_type = other DNA
atggacgacgacgacaaggcagatgtgtcggttgaaaaaaaaaaaaaaaaaaaaaaaaa

SEQ ID NO: 1190 - DNA, 59 bp, synthetic construct
  misc_feature 1..59: note = Description of sequence: Primer
  source 1..59: mol_type = other DNA
atggacgacgacgacaagacgaacttcccttatgaaaaaaaaaaaaaaaaaaaaaaaaa

SEQ ID NO: 1191 - DNA, 59 bp, synthetic construct
  misc_feature 1..59: note = Description of sequence: Primer
  source 1..59: mol_type = other DNA
atggacgacgacgacaaggagtcactccgtcactaaaaaaaaaaaaaaaaaaaaaaaaa

SEQ ID NO: 1192 - DNA, 59 bp, synthetic construct
  misc_feature 1..59: note = Description of sequence: Primer
  source 1..59: mol_type = other DNA
atggacgacgacgacaagttcgagacgtgagcgtaaaaaaaaaaaaaaaaaaaaaaaaa

SEQ ID NO: 1193 - DNA, 59 bp, synthetic construct
  misc_feature 1..59: note = Description of sequence: Primer
  source 1..59: mol_type = other DNA
atggacgacgacgacaagaatactgtggcacctcaaaaaaaaaaaaaaaaaaaaaaaaa

SEQ ID NO: 1194 - DNA, 59 bp, synthetic construct
  misc_feature 1..59: note = Description of sequence: Primer
  source 1..59: mol_type = other DNA
atggacgacgacgacaagcaaagttcagtgtgagaaaaaaaaaaaaaaaaaaaaaaaaa

SEQ ID NO: 1195 - DNA, 59 bp, synthetic construct
  misc_feature 1..59: note = Description of sequence: Primer
  source 1..59: mol_type = other DNA
atggacgacgacgacaagatttgccattgccttcaaaaaaaaaaaaaaaaaaaaaaaaa

SEQ ID NO: 1196 - DNA, 59 bp, synthetic construct
  misc_feature 1..59: note = Description of sequence: Primer
  source 1..59: mol_type = other DNA
atggacgacgacgacaagacgtaccatatgcgataaaaaaaaaaaaaaaaaaaaaaaaa

SEQ ID NO: 1197 - DNA, 59 bp, synthetic construct
  misc_feature 1..59: note = Description of sequence: Primer
  source 1..59: mol_type = other DNA
atggacgacgacgacaagcccagtcgggaattataaaaaaaaaaaaaaaaaaaaaaaaa

SEQ ID NO: 1198 - DNA, 59 bp, synthetic construct
  misc_feature 1..59: note = Description of sequence: Primer
  source 1..59: mol_type = other DNA
atggacgacgacgacaaggcaatatctatgggccaaaaaaaaaaaaaaaaaaaaaaaaa

SEQ ID NO: 1199 - DNA, 59 bp, synthetic construct
  misc_feature 1..59: note = Description of sequence: Primer
  source 1..59: mol_type = other DNA
atggacgacgacgacaagcttgtcctcaagtgagaaaaaaaaaaaaaaaaaaaaaaaaa

SEQ ID NO: 1200 - DNA, 59 bp, synthetic construct
  misc_feature 1..59: note = Description of sequence: Primer
  source 1..59: mol_type = other DNA
atggacgacgacgacaagttgctaaacatgggcaaaaaaaaaaaaaaaaaaaaaaaaaa

SEQ ID NO: 1201 - DNA, 59 bp, synthetic construct
  misc_feature 1..59: note = Description of sequence: Primer
  source 1..59: mol_type = other DNA
atggacgacgacgacaagtcagagtctaataggcaaaaaaaaaaaaaaaaaaaaaaaaa

SEQ ID NO: 1202 - DNA, 59 bp, synthetic construct
  misc_feature 1..59: note = Description of sequence: Primer
  source 1..59: mol_type = other DNA
atggacgacgacgacaaggtggttcccgtttgataaaaaaaaaaaaaaaaaaaaaaaaa

SEQ ID NO: 1203 - DNA, 59 bp, synthetic construct
  misc_feature 1..59: note = Description of sequence: Primer
  source 1..59: mol_type = other DNA
atggacgacgacgacaaggtgtcctgatagggataaaaaaaaaaaaaaaaaaaaaaaaa

SEQ ID NO: 1204 - DNA, 59 bp, synthetic construct
  misc_feature 1..59: note = Description of sequence: Primer
  source 1..59: mol_type = other DNA
atggacgacgacgacaagcttttccagcataccgaaaaaaaaaaaaaaaaaaaaaaaaa

SEQ ID NO: 1205 - DNA, 59 bp, synthetic construct
  misc_feature 1..59: note = Description of sequence: Primer
  source 1..59: mol_type = other DNA
atggacgacgacgacaagagtcacggatttctagaaaaaaaaaaaaaaaaaaaaaaaaa

SEQ ID NO: 1206 - DNA, 59 bp, synthetic construct
  misc_feature 1..59: note = Description of sequence: Primer
  source 1..59: mol_type = other DNA
atggacgacgacgacaagatgggtcacaaccagtaaaaaaaaaaaaaaaaaaaaaaaaa

SEQ ID NO: 1207 - DNA, 59 bp, synthetic construct
  misc_feature 1..59: note = Description of sequence: Primer
  source 1..59: mol_type = other DNA
atggacgacgacgacaaggcacaggacagtaactaaaaaaaaaaaaaaaaaaaaaaaaa

SEQ ID NO: 1208 - DNA, 59 bp, synthetic construct
  misc_feature 1..59: note = Description of sequence: Primer
  source 1..59: mol_type = other DNA
atggacgacgacgacaagcatctacaacggaacaaaaaaaaaaaaaaaaaaaaaaaaaa

SEQ ID NO: 1209 - DNA, 59 bp, synthetic construct
  misc_feature 1..59: note = Description of sequence: Primer
  source 1..59: mol_type = other DNA
atggacgacgacgacaagataagaccgtaaaggcaaaaaaaaaaaaaaaaaaaaaaaaa

SEQ ID NO: 1210 - DNA, 59 bp, synthetic construct
  misc_feature 1..59: note = Description of sequence: Primer
  source 1..59: mol_type = other DNA
atggacgacgacgacaaggctcgcttcgctagttaaaaaaaaaaaaaaaaaaaaaaaaa

SEQ ID NO: 1211 - DNA, 59 bp, synthetic construct
  misc_feature 1..59: note = Description of sequence: Primer
  source 1..59: mol_type = other DNA
atggacgacgacgacaaggaaagcctataccactaaaaaaaaaaaaaaaaaaaaaaaaa

SEQ ID NO: 1212 - DNA, 59 bp, synthetic construct
  misc_feature 1..59: note = Description of sequence: Primer
  source 1..59: mol_type = other DNA
atggacgacgacgacaagggtaaagacggtgtccaaaaaaaaaaaaaaaaaaaaaaaaa

SEQ ID NO: 1213 - DNA, 59 bp, synthetic construct
  misc_feature 1..59: note = Description of sequence: Primer
  source 1..59: mol_type = other DNA
atggacgacgacgacaagttgttcggcctgaggtaaaaaaaaaaaaaaaaaaaaaaaaa

SEQ ID NO: 1214 - DNA, 59 bp, synthetic construct
  misc_feature 1..59: note = Description of sequence: Primer
  source 1..59: mol_type = other DNA
atggacgacgacgacaaggtcggctagagaacacaaaaaaaaaaaaaaaaaaaaaaaaa

SEQ ID NO: 1215 - DNA, 59 bp, synthetic construct
  misc_feature 1..59: note = Description of sequence: Primer
  source 1..59: mol_type = other DNA
atggacgacgacgacaagagagtccgtgcgatataaaaaaaaaaaaaaaaaaaaaaaaa

SEQ ID NO: 1216 - DNA, 59 bp, synthetic construct
  misc_feature 1..59: note = Description of sequence: Primer
  source 1..59: mol_type = other DNA
atggacgacgacgacaagatatcgcgcagtaccaaaaaaaaaaaaaaaaaaaaaaaaaa

SEQ ID NO: 1217 - DNA, 59 bp, synthetic construct
  misc_feature 1..59: note = Description of sequence: Primer
  source 1..59: mol_type = other DNA
atggacgacgacgacaagcaaagctacgggctttaaaaaaaaaaaaaaaaaaaaaaaaa

SEQ ID NO: 1218 - DNA, 59 bp, synthetic construct
  misc_feature 1..59: note = Description of sequence: Primer
  source 1..59: mol_type = other DNA
atggacgacgacgacaagaccgcaaaccacatttaaaaaaaaaaaaaaaaaaaaaaaaa

SEQ ID NO: 1219 - DNA, 59 bp, synthetic construct
  misc_feature 1..59: note = Description of sequence: Primer
  source 1..59: mol_type = other DNA
atggacgacgacgacaagcggttaagctgattgtaaaaaaaaaaaaaaaaaaaaaaaaa

SEQ ID NO: 1220 - DNA, 59 bp, synthetic construct
  misc_feature 1..59: note = Description of sequence: Primer
  source 1..59: mol_type = other DNA
atggacgacgacgacaagtttgtctcacgtccagaaaaaaaaaaaaaaaaaaaaaaaaa

SEQ ID NO: 1221 - DNA, 59 bp, synthetic construct
  misc_feature 1..59: note = Description of sequence: Primer
  source 1..59: mol_type = other DNA
atggacgacgacgacaagcttccgcgagcaaaagaaaaaaaaaaaaaaaaaaaaaaaaa

SEQ ID NO: 1222 - DNA, 59 bp, synthetic construct
  misc_feature 1..59: note = Description of sequence: Primer
  source 1..59: mol_type = other DNA
atggacgacgacgacaagcaagtcggatctactaaaaaaaaaaaaaaaaaaaaaaaaaa

SEQ ID NO: 1223 - DNA, 59 bp, synthetic construct
  misc_feature 1..59: note = Description of sequence: Primer
  source 1..59: mol_type = other DNA
atggacgacgacgacaagaatactcgcgacggctaaaaaaaaaaaaaaaaaaaaaaaaa

SEQ ID NO: 1224 - DNA, 59 bp, synthetic construct
  misc_feature 1..59: note = Description of sequence: Primer
  source 1..59: mol_type = other DNA
atggacgacgacgacaagcgcctatcgccgttttaaaaaaaaaaaaaaaaaaaaaaaaa

SEQ ID NO: 1225 - DNA, 59 bp, synthetic construct
  misc_feature 1..59: note = Description of sequence: Primer
  source 1..59: mol_type = other DNA
atggacgacgacgacaaggtttactactacacgcaaaaaaaaaaaaaaaaaaaaaaaaa

SEQ ID NO: 1226 - DNA, 59 bp, synthetic construct
  misc_feature 1..59: note = Description of sequence: Primer
  source 1..59: mol_type = other DNA
atggacgacgacgacaaggttaaggttacgtcacaaaaaaaaaaaaaaaaaaaaaaaaa

SEQ ID NO: 1227 - DNA, 59 bp, synthetic construct
  misc_feature 1..59: note = Description of sequence: Primer
  source 1..59: mol_type = other DNA
atggacgacgacgacaagagctgttcacacgaccaaaaaaaaaaaaaaaaaaaaaaaaa

SEQ ID NO: 1228 - DNA, 59 bp, synthetic construct
  misc_feature 1..59: note = Description of sequence: Primer
  source 1..59: mol_type = other DNA
atggacgacgacgacaagcaatactctctggcataaaaaaaaaaaaaaaaaaaaaaaaa

SEQ ID NO: 1229 - DNA, 59 bp, synthetic construct
  misc_feature 1..59: note = Description of sequence: Primer
  source 1..59: mol_type = other DNA
atggacgacgacgacaagttccagtgcatgcgttaaaaaaaaaaaaaaaaaaaaaaaaa

SEQ ID NO: 1230 - DNA, 59 bp, synthetic construct
  misc_feature 1..59: note = Description of sequence: Primer
  source 1..59: mol_type = other DNA
atggacgacgacgacaagtgccttttccccgcataaaaaaaaaaaaaaaaaaaaaaaaa

SEQ ID NO: 1231 - DNA, 59 bp, synthetic construct
  misc_feature 1..59: note = Description of sequence: Primer
  source 1..59: mol_type = other DNA
atggacgacgacgacaagcctaacccaaggaagcaaaaaaaaaaaaaaaaaaaaaaaaa

SEQ ID NO: 1232 - DNA, 59 bp, synthetic construct
  misc_feature 1..59: note = Description of sequence: Primer
  source 1..59: mol_type = other DNA
atggacgacgacgacaagtagtcttacatctccgaaaaaaaaaaaaaaaaaaaaaaaaa

SEQ ID NO: 1233 - DNA, 59 bp, synthetic construct
  misc_feature 1..59: note = Description of sequence: Primer
  source 1..59: mol_type = other DNA
atggacgacgacgacaagctagggtaggctatagaaaaaaaaaaaaaaaaaaaaaaaaa

SEQ ID NO: 1234 - DNA, 59 bp, synthetic construct
  misc_feature 1..59: note = Description of sequence: Primer
  source 1..59: mol_type = other DNA
atggacgacgacgacaagtcttgtggaggcttttaaaaaaaaaaaaaaaaaaaaaaaaa

SEQ ID NO: 1235 - DNA, 59 bp, synthetic construct
  misc_feature 1..59: note = Description of sequence: Primer
  source 1..59: mol_type = other DNA
atggacgacgacgacaagggaacgagaattacgtaaaaaaaaaaaaaaaaaaaaaaaaa

SEQ ID NO: 1236 - DNA, 59 bp, synthetic construct
  misc_feature 1..59: note = Description of sequence: Primer
  source 1..59: mol_type = other DNA
atggacgacgacgacaagggtaagaaatgcttggaaaaaaaaaaaaaaaaaaaaaaaaa

SEQ ID NO: 1237 - DNA, 59 bp, synthetic construct
  misc_feature 1..59: note = Description of sequence: Primer
  source 1..59: mol_type = other DNA
atggacgacgacgacaagagtcttcaccaactcaaaaaaaaaaaaaaaaaaaaaaaaaa

SEQ ID NO: 1238 - DNA, 59 bp, synthetic construct
  misc_feature 1..59: note = Description of sequence: Primer
  source 1..59: mol_type = other DNA
atggacgacgacgacaagtcaacaaagccttgctaaaaaaaaaaaaaaaaaaaaaaaaa

SEQ ID NO: 1239 - DNA, 59 bp, synthetic construct
  misc_feature 1..59: note = Description of sequence: Primer
  source 1..59: mol_type = other DNA
atggacgacgacgacaagggttgctagctctaagaaaaaaaaaaaaaaaaaaaaaaaaa

SEQ ID NO: 1240 - DNA, 59 bp, synthetic construct
  misc_feature 1..59: note = Description of sequence: Primer
  source 1..59: mol_type = other DNA
atggacgacgacgacaagcttaccttgttcacctaaaaaaaaaaaaaaaaaaaaaaaaa

SEQ ID NO: 1241 - DNA, 59 bp, synthetic construct
  misc_feature 1..59: note = Description of sequence: Primer
  source 1..59: mol_type = other DNA
atggacgacgacgacaagaacatgtagaggggtgaaaaaaaaaaaaaaaaaaaaaaaaa

SEQ ID NO: 1242 - DNA, 59 bp, synthetic construct
  misc_feature 1..59: note = Description of sequence: Primer
  source 1..59: mol_type = other DNA
atggacgacgacgacaagttgggttccttcacttaaaaaaaaaaaaaaaaaaaaaaaaa

SEQ ID NO: 1243 - DNA, 59 bp, synthetic construct
  misc_feature 1..59: note = Description of sequence: Primer
  source 1..59: mol_type = other DNA
atggacgacgacgacaaggcaccatgctacagtgaaaaaaaaaaaaaaaaaaaaaaaaa

SEQ ID NO: 1244 - DNA, 59 bp, synthetic construct
  misc_feature 1..59: note = Description of sequence: Primer
  source 1..59: mol_type = other DNA
atggacgacgacgacaagatgcatgagaaagggaaaaaaaaaaaaaaaaaaaaaaaaaa

SEQ ID NO: 1245 - DNA, 59 bp, synthetic construct
  misc_feature 1..59: note = Description of sequence: Primer
  source 1..59: mol_type = other DNA
atggacgacgacgacaagccactagtgagatagaaaaaaaaaaaaaaaaaaaaaaaaaa

SEQ ID NO: 1246 - DNA, 59 bp, synthetic construct
  misc_feature 1..59: note = Description of sequence: Primer
  source 1..59: mol_type = other DNA
atggacgacgacgacaagcgacacaccaatattgaaaaaaaaaaaaaaaaaaaaaaaaa

SEQ ID NO: 1247 - DNA, 59 bp, synthetic construct
  misc_feature 1..59: note = Description of sequence: Primer
  source 1..59: mol_type = other DNA
atggacgacgacgacaagcagatagtcttgtcacaaaaaaaaaaaaaaaaaaaaaaaaa

SEQ ID NO: 1248 - DNA, 59 bp, synthetic construct
  misc_feature 1..59: note = Description of sequence: Primer
  source 1..59: mol_type = other DNA
atggacgacgacgacaagttgtcgagggatacttaaaaaaaaaaaaaaaaaaaaaaaaa

SEQ ID NO: 1249 - DNA, 59 bp, synthetic construct
  misc_feature 1..59: note = Description of sequence: Primer
  source 1..59: mol_type = other DNA
atggacgacgacgacaagcgttgagcacctttgcaaaaaaaaaaaaaaaaaaaaaaaaa

SEQ ID NO: 1250 - DNA, 59 bp, synthetic construct
  misc_feature 1..59: note = Description of sequence: Primer
  source 1..59: mol_type = other DNA
atggacgacgacgacaagaacagagaagaatcgcaaaaaaaaaaaaaaaaaaaaaaaaa

SEQ ID NO: 1251 - DNA, 59 bp, synthetic construct
  misc_feature 1..59: note = Description of sequence: Primer
  source 1..59: mol_type = other DNA
atggacgacgacgacaaggcgtgcttgtactccaaaaaaaaaaaaaaaaaaaaaaaaaa

SEQ ID NO: 1252 - DNA, 59 bp, synthetic construct
  misc_feature 1..59: note = Description of sequence: Primer
  source 1..59: mol_type = other DNA
atggacgacgacgacaagttcacgcctcattgataaaaaaaaaaaaaaaaaaaaaaaaa

SEQ ID NO: 1253 - DNA, 59 bp, synthetic construct
  misc_feature 1..59: note = Description of sequence: Primer
  source 1..59: mol_type = other DNA
atggacgacgacgacaagccggcatccgttatacaaaaaaaaaaaaaaaaaaaaaaaaa

SEQ ID NO: 1254 - DNA, 59 bp, synthetic construct
  misc_feature 1..59: note = Description of sequence: Primer
  source 1..59: mol_type = other DNA
atggacgacgacgacaagtgagcgttaaccagataaaaaaaaaaaaaaaaaaaaaaaaa

SEQ ID NO: 1255 - DNA, 59 bp, synthetic construct
  misc_feature 1..59: note = Description of sequence: Primer
  source 1..59: mol_type = other DNA
atggacgacgacgacaagtgccgattagcctacgaaaaaaaaaaaaaaaaaaaaaaaaa

SEQ ID NO: 1256 - DNA, 59 bp, synthetic construct
  misc_feature 1..59: note = Description of sequence: Primer
  source 1..59: mol_type = other DNA
atggacgacgacgacaagtgttcgtgtggcgcataaaaaaaaaaaaaaaaaaaaaaaaa

SEQ ID NO: 1257 - DNA, 59 bp, synthetic construct
  misc_feature 1..59: note = Description of sequence: Primer
  source 1..59: mol_type = other DNA
atggacgacgacgacaagaccggtagcttatcacaaaaaaaaaaaaaaaaaaaaaaaaa

SEQ ID NO: 1258 - DNA, 59 bp, synthetic construct
  misc_feature 1..59: note = Description of sequence: Primer
  source 1..59: mol_type = other DNA
atggacgacgacgacaagacgggagctcactgataaaaaaaaaaaaaaaaaaaaaaaaa

SEQ ID NO: 1259 - DNA, 59 bp, synthetic construct
  misc_feature 1..59: note = Description of sequence: Primer
  source 1..59: mol_type = other DNA
atggacgacgacgacaaggtataactcgagagctaaaaaaaaaaaaaaaaaaaaaaaaa

SEQ ID NO: 1260 - DNA, 59 bp, synthetic construct
  misc_feature 1..59: note = Description of sequence: Primer
  source 1..59: mol_type = other DNA
atggacgacgacgacaagcccatcggttatccctaaaaaaaaaaaaaaaaaaaaaaaaa

SEQ ID NO: 1261 - DNA, 59 bp, synthetic construct
  misc_feature 1..59: note = Description of sequence: Primer
  source 1..59: mol_type = other DNA
atggacgacgacgacaagagacatgccccgctataaaaaaaaaaaaaaaaaaaaaaaaa

SEQ ID NO: 1262 - DNA, 59 bp, synthetic construct
  misc_feature 1..59: note = Description of sequence: Primer
  source 1..59: mol_type = other DNA
atggacgacgacgacaaggtttctaatcgtccgcaaaaaaaaaaaaaaaaaaaaaaaaa

SEQ ID NO: 1263 - DNA, 59 bp, synthetic construct
  misc_feature 1..59: note = Description of sequence: Primer
  source 1..59: mol_type = other DNA
atggacgacgacgacaaggaatgaagcttcgacaaaaaaaaaaaaaaaaaaaaaaaaaa

SEQ ID NO: 1264 - DNA, 59 bp, synthetic construct
  misc_feature 1..59: note = Description of sequence: Primer
  source 1..59: mol_type = other DNA
atggacgacgacgacaaggcgattgacccattgaaaaaaaaaaaaaaaaaaaaaaaaaa

SEQ ID NO: 1265 - DNA, 59 bp, synthetic construct
  misc_feature 1..59: note = Description of sequence: Primer
  source 1..59: mol_type = other DNA
atggacgacgacgacaaggttggtcctctagagaaaaaaaaaaaaaaaaaaaaaaaaaa

SEQ ID NO: 1266 - DNA, 59 bp, synthetic construct
  misc_feature 1..59: note = Description of sequence: Primer
  source 1..59: mol_type = other DNA
atggacgacgacgacaagttgttattcgcccctcaaaaaaaaaaaaaaaaaaaaaaaaa

SEQ ID NO: 1267 - DNA, 59 bp, synthetic construct
  misc_feature 1..59: note = Description of sequence: Primer
  source 1..59: mol_type = other DNA
atggacgacgacgacaagattggtgtgtagagctaaaaaaaaaaaaaaaaaaaaaaaaa

SEQ ID NO: 1268 - DNA, 59 bp, synthetic construct
  misc_feature 1..59: note = Description of sequence: Primer
  source 1..59: mol_type = other DNA
atggacgacgacgacaagtgccggatgtaattgcaaaaaaaaaaaaaaaaaaaaaaaaa

SEQ ID NO: 1269 - DNA, 59 bp, synthetic construct
  misc_feature 1..59: note = Description of sequence: Primer
  source 1..59: mol_type = other DNA
atggacgacgacgacaagagaaacgaaacgttcgaaaaaaaaaaaaaaaaaaaaaaaaa

SEQ ID NO: 1270 - DNA, 59 bp, synthetic construct
  misc_feature 1..59: note = Description of sequence: Primer
  source 1..59: mol_type = other DNA
atggacgacgacgacaagcccaaggatggtgctaaaaaaaaaaaaaaaaaaaaaaaaaa

SEQ ID NO: 1271 - DNA, 59 bp, synthetic construct
  misc_feature 1..59: note = Description of sequence: Primer
  source 1..59: mol_type = other DNA
atggacgacgacgacaagggaatgggcgagttcaaaaaaaaaaaaaaaaaaaaaaaaaa

SEQ ID NO: 1272 - DNA, 59 bp, synthetic construct
  misc_feature 1..59: note = Description of sequence: Primer
  source 1..59: mol_type = other DNA
atggacgacgacgacaagccagcttacccgtattaaaaaaaaaaaaaaaaaaaaaaaaa

SEQ ID NO: 1273 - DNA, 59 bp, synthetic construct
  misc_feature 1..59: note = Description of sequence: Primer
  source 1..59: mol_type = other DNA
atggacgacgacgacaagtacgctttaccgtcccaaaaaaaaaaaaaaaaaaaaaaaaa

SEQ ID NO: 1274 - DNA, 59 bp, synthetic construct
  misc_feature 1..59: note = Description of sequence: Primer
  source 1..59: mol_type = other DNA
atggacgacgacgacaaggcgcttcgattctattaaaaaaaaaaaaaaaaaaaaaaaaa

SEQ ID NO: 1275 - DNA, 59 bp, synthetic construct
  misc_feature 1..59: note = Description of sequence: Primer
  source 1..59: mol_type = other DNA
atggacgacgacgacaaggcaagtgtgggaacgtaaaaaaaaaaaaaaaaaaaaaaaaa

SEQ ID NO: 1276 - DNA, 59 bp, synthetic construct
  misc_feature 1..59: note = Description of sequence: Primer
  source 1..59: mol_type = other DNA
atggacgacgacgacaaggaagctcaattggccaaaaaaaaaaaaaaaaaaaaaaaaaa

SEQ ID NO: 1277 - DNA, 59 bp, synthetic construct
  misc_feature 1..59: note = Description of sequence: Primer
  source 1..59: mol_type = other DNA
atggacgacgacgacaagttttccaccctgcatcaaaaaaaaaaaaaaaaaaaaaaaaa

SEQ ID NO: 1278 - DNA, 59 bp, synthetic construct
  misc_feature 1..59: note = Description of sequence: Primer
  source 1..59: mol_type = other DNA
atggacgacgacgacaaggtcttcgggtgagtttaaaaaaaaaaaaaaaaaaaaaaaaa

SEQ ID NO: 1279 - DNA, 59 bp, synthetic construct
  misc_feature 1..59: note = Description of sequence: Primer
  source 1..59: mol_type = other DNA
atggacgacgacgacaagagaatgctgctggtttaaaaaaaaaaaaaaaaaaaaaaaaa

SEQ ID NO: 1280 - DNA, 59 bp, synthetic construct
  misc_feature 1..59: note = Description of sequence: Primer
  source 1..59: mol_type = other DNA
atggacgacgacgacaagtgcatcacgttagacgaaaaaaaaaaaaaaaaaaaaaaaaa

SEQ ID NO: 1281 - DNA, 59 bp, synthetic construct
  misc_feature 1..59: note = Description of sequence: Primer
  source 1..59: mol_type = other DNA
atggacgacgacgacaagtcgttgccatgaactcaaaaaaaaaaaaaaaaaaaaaaaaa

SEQ ID NO: 1282 - DNA, 59 bp, synthetic construct
  misc_feature 1..59: note = Description of sequence: Primer
  source 1..59: mol_type = other DNA
atggacgacgacgacaagtgacgcttgccatctaaaaaaaaaaaaaaaaaaaaaaaaaa

SEQ ID NO: 1283 - DNA, 59 bp, synthetic construct
  misc_feature 1..59: note = Description of sequence: Primer
  source 1..59: mol_type = other DNA
atggacgacgacgacaagggcctgtaaggattacaaaaaaaaaaaaaaaaaaaaaaaaa

SEQ ID NO: 1284 - DNA, 59 bp, synthetic construct
  misc_feature 1..59: note = Description of sequence: Primer
  source 1..59: mol_type = other DNA
atggacgacgacgacaaggccgattcgattcactaaaaaaaaaaaaaaaaaaaaaaaaa

SEQ ID NO: 1285 - DNA, 59 bp, synthetic construct
  misc_feature 1..59: note = Description of sequence: Primer
  source 1..59: mol_type = other DNA
atggacgacgacgacaagggagaaccagaacgacaaaaaaaaaaaaaaaaaaaaaaaaa

SEQ ID NO: 1286 - DNA, 59 bp, synthetic construct
  misc_feature 1..59: note = Description of sequence: Primer
  source 1..59: mol_type = other DNA
atggacgacgacgacaagaacgccttttacgtgtaaaaaaaaaaaaaaaaaaaaaaaaa

SEQ ID NO: 1287 - DNA, 59 bp, synthetic construct
  misc_feature 1..59: note = Description of sequence: Primer
  source 1..59: mol_type = other DNA
atggacgacgacgacaagaagtcccctctactgcaaaaaaaaaaaaaaaaaaaaaaaaa

SEQ ID NO: 1288 - DNA, 59 bp, synthetic construct
  misc_feature 1..59: note = Description of sequence: Primer
  source 1..59: mol_type = other DNA
atggacgacgacgacaagacattcaggtccctccaaaaaaaaaaaaaaaaaaaaaaaaa

SEQ ID NO: 1289 - DNA, 59 bp, synthetic construct
  misc_feature 1..59: note = Description of sequence: Primer
  source 1..59: mol_type = other DNA
atggacgacgacgacaagtaggggatggttctggaaaaaaaaaaaaaaaaaaaaaaaaa

SEQ ID NO: 1290 - DNA, 59 bp, synthetic construct
  misc_feature 1..59: note = Description of sequence: Primer
  source 1..59: mol_type = other DNA
atggacgacgacgacaagcaagtggatggagaggaaaaaaaaaaaaaaaaaaaaaaaaa

SEQ ID NO: 1291 - DNA, 59 bp, synthetic construct
  misc_feature 1..59: note = Description of sequence: Primer
  source 1..59: mol_type = other DNA
atggacgacgacgacaaggctctctacaaaggggaaaaaaaaaaaaaaaaaaaaaaaaa

SEQ ID NO: 1292 - DNA, 59 bp, synthetic construct
  misc_feature 1..59: note = Description of sequence: Primer
  source 1..59: mol_type = other DNA
atggacgacgacgacaaggtacaatagacgagtcaaaaaaaaaaaaaaaaaaaaaaaaa

SEQ ID NO: 1293 - DNA, 59 bp, synthetic construct
  misc_feature 1..59: note = Description of sequence: Primer
  source 1..59: mol_type = other DNA
atggacgacgacgacaagctaaagtcatcctgccaaaaaaaaaaaaaaaaaaaaaaaaa

SEQ ID NO: 1294 - DNA, 59 bp, synthetic construct
  misc_feature 1..59: note = Description of sequence: Primer
  source 1..59: mol_type = other DNA
atggacgacgacgacaagcctattgtactcctcgaaaaaaaaaaaaaaaaaaaaaaaaa

SEQ ID NO: 1295 - DNA, 59 bp, synthetic construct
  misc_feature 1..59: note = Description of sequence: Primer
  source 1..59: mol_type = other DNA
atggacgacgacgacaagtatgacgctgtaggcgaaaaaaaaaaaaaaaaaaaaaaaaa

SEQ ID NO: 1296 - DNA, 59 bp, synthetic construct
  misc_feature 1..59: note = Description of sequence: Primer
  source 1..59: mol_type = other DNA
atggacgacgacgacaaggctaggtctgactgtcaaaaaaaaaaaaaaaaaaaaaaaaa

SEQ ID NO: 1297 - DNA, 59 bp, synthetic construct
  misc_feature 1..59: note = Description of sequence: Primer
  source 1..59: mol_type = other DNA
atggacgacgacgacaagtccagagaatgtgagtaaaaaaaaaaaaaaaaaaaaaaaaa

SEQ ID NO: 1298 - DNA, 59 bp, synthetic construct
  misc_feature 1..59: note = Description of sequence: Primer
  source 1..59: mol_type = other DNA
atggacgacgacgacaagtgcttcagtcacagtaaaaaaaaaaaaaaaaaaaaaaaaaa

SEQ ID NO: 1299 - DNA, 59 bp, synthetic construct
  misc_feature 1..59: note = Description of sequence: Primer
  source 1..59: mol_type = other DNA
atggacgacgacgacaagttggtgactccgacctaaaaaaaaaaaaaaaaaaaaaaaaa

SEQ ID NO: 1300 - DNA, 59 bp, synthetic construct
  misc_feature 1..59: note = Description of sequence: Primer
  source 1..59: mol_type = other DNA
atggacgacgacgacaaggcttcccattcatactaaaaaaaaaaaaaaaaaaaaaaaaa

SEQ ID NO: 1301 - DNA, 59 bp, synthetic construct
  misc_feature 1..59: note = Description of sequence: Primer
  source 1..59: mol_type = other DNA
atggacgacgacgacaagtatgtcaactcgcgggaaaaaaaaaaaaaaaaaaaaaaaaa

SEQ ID NO: 1302 - DNA, 59 bp, synthetic construct
  misc_feature 1..59: note = Description of sequence: Primer
  source 1..59: mol_type = other DNA
atggacgacgacgacaagaccaacggcttcttgaaaaaaaaaaaaaaaaaaaaaaaaaa

SEQ ID NO: 1303 - DNA, 59 bp, synthetic construct
  misc_feature 1..59: note = Description of sequence: Primer
  source 1..59: mol_type = other DNA
atggacgacgacgacaaggtccacccaccatattaaaaaaaaaaaaaaaaaaaaaaaaa

SEQ ID NO: 1304 - DNA, 59 bp, synthetic construct
  misc_feature 1..59: note = Description of sequence: Primer
  source 1..59: mol_type = other DNA
atggacgacgacgacaagaaagatcccggctataaaaaaaaaaaaaaaaaaaaaaaaaa

SEQ ID NO: 1305 - DNA, 59 bp, synthetic construct
  misc_feature 1..59: note = Description of sequence: Primer
  source 1..59: mol_type = other DNA
atggacgacgacgacaaggggacatcgtttaacaaaaaaaaaaaaaaaaaaaaaaaaaa

SEQ ID NO: 1306 - DNA, 59 bp, synthetic construct
  misc_feature 1..59: note = Description of sequence: Primer
  source 1..59: mol_type = other DNA
atggacgacgacgacaagctcgtgcatccacgtaaaaaaaaaaaaaaaaaaaaaaaaaa

SEQ ID NO: 1307 - DNA, 59 bp, synthetic construct
  misc_feature 1..59: note = Description of sequence: Primer
  source 1..59: mol_type = other DNA
atggacgacgacgacaagaccggactctggtactaaaaaaaaaaaaaaaaaaaaaaaaa

SEQ ID NO: 1308 - DNA, 59 bp, synthetic construct
  misc_feature 1..59: note = Description of sequence: Primer
  source 1..59: mol_type = other DNA
atggacgacgacgacaagctgtagtgcgcagtataaaaaaaaaaaaaaaaaaaaaaaaa

SEQ ID NO: 1309 - DNA, 59 bp, synthetic construct
  misc_feature 1..59: note = Description of sequence: Primer
  source 1..59: mol_type = other DNA
atggacgacgacgacaagacacttcggtgacctgaaaaaaaaaaaaaaaaaaaaaaaaa

SEQ ID NO: 1310 - DNA, 59 bp, synthetic construct
  misc_feature 1..59: note = Description of sequence: Primer
  source 1..59: mol_type = other DNA
atggacgacgacgacaagtactgcttccgactgaaaaaaaaaaaaaaaaaaaaaaaaaa

SEQ ID NO: 1311 - DNA, 59 bp, synthetic construct
  misc_feature 1..59: note = Description of sequence: Primer
  source 1..59: mol_type = other DNA
atggacgacgacgacaaggtttcagcccaaacttaaaaaaaaaaaaaaaaaaaaaaaaa

SEQ ID NO: 1312 - DNA, 59 bp, synthetic construct
  misc_feature 1..59: note = Description of sequence: Primer
  source 1..59: mol_type = other DNA
atggacgacgacgacaagcgtactgacctcgagtaaaaaaaaaaaaaaaaaaaaaaaaa

SEQ ID NO: 1313 - DNA, 59 bp, synthetic construct
  misc_feature 1..59: note = Description of sequence: Primer
  source 1..59: mol_type = other DNA
atggacgacgacgacaaggcgtcaaacttttgagaaaaaaaaaaaaaaaaaaaaaaaaa

SEQ ID NO: 1314 - DNA, 59 bp, synthetic construct
  misc_feature 1..59: note = Description of sequence: Primer
  source 1..59: mol_type = other DNA
atggacgacgacgacaagatccctttggatccctaaaaaaaaaaaaaaaaaaaaaaaaa

SEQ ID NO: 1315 - DNA, 59 bp, synthetic construct
  misc_feature 1..59: note = Description of sequence: Primer
  source 1..59: mol_type = other DNA
atggacgacgacgacaagcttcgttgttcatcgtaaaaaaaaaaaaaaaaaaaaaaaaa

SEQ ID NO: 1316 - DNA, 59 bp, synthetic construct
  misc_feature 1..59: note = Description of sequence: Primer
  source 1..59: mol_type = other DNA
atggacgacgacgacaagcgtctaggataccataaaaaaaaaaaaaaaaaaaaaaaaaa

SEQ ID NO: 1317 - DNA, 59 bp, synthetic construct
  misc_feature 1..59: note = Description of sequence: Primer
  source 1..59: mol_type = other DNA
atggacgacgacgacaagctaagccaaatctcgcaaaaaaaaaaaaaaaaaaaaaaaaa

SEQ ID NO: 1318 - DNA, 59 bp, synthetic construct
  misc_feature 1..59: note = Description of sequence: Primer
  source 1..59: mol_type = other DNA
atggacgacgacgacaagggacgtagagcactagaaaaaaaaaaaaaaaaaaaaaaaaa

SEQ ID NO: 1319 - DNA, 59 bp, synthetic construct
  misc_feature 1..59: note = Description of sequence: Primer
  source 1..59: mol_type = other DNA
atggacgacgacgacaagacccctgatagatcttaaaaaaaaaaaaaaaaaaaaaaaaa

SEQ ID NO: 1320 - DNA, 59 bp, synthetic construct
  misc_feature 1..59: note = Description of sequence: Primer
  source 1..59: mol_type = other DNA
atggacgacgacgacaagagcactgcggtttgttaaaaaaaaaaaaaaaaaaaaaaaaa

SEQ ID NO: 1321 - DNA, 59 bp, synthetic construct
  misc_feature 1..59: note = Description of sequence: Primer
  source 1..59: mol_type = other DNA
atggacgacgacgacaagcgctctatgtaggaataaaaaaaaaaaaaaaaaaaaaaaaa

SEQ ID NO: 1322 - DNA, 59 bp, synthetic construct
  misc_feature 1..59: note = Description of sequence: Primer
  source 1..59: mol_type = other DNA
atggacgacgacgacaagctttgataccatgggaaaaaaaaaaaaaaaaaaaaaaaaaa

SEQ ID NO: 1323 - DNA, 59 bp, synthetic construct
  misc_feature 1..59: note = Description of sequence: Primer
  source 1..59: mol_type = other DNA
atggacgacgacgacaagccaccaccatcttctgaaaaaaaaaaaaaaaaaaaaaaaaa

SEQ ID NO: 1324 - DNA, 59 bp, synthetic construct
  misc_feature 1..59: note = Description of sequence: Primer
  source 1..59: mol_type = other DNA
atggacgacgacgacaagcagtcgtattgggaccaaaaaaaaaaaaaaaaaaaaaaaaa

SEQ ID NO: 1325 - DNA, 59 bp, synthetic construct
  misc_feature 1..59: note = Description of sequence: Primer
  source 1..59: mol_type = other DNA
atggacgacgacgacaagggtgtacatctgttgtaaaaaaaaaaaaaaaaaaaaaaaaa

SEQ ID NO: 1326 - DNA, 59 bp, synthetic construct
  misc_feature 1..59: note = Description of sequence: Primer
  source 1..59: mol_type = other DNA
atggacgacgacgacaagcttgtggagagtcgataaaaaaaaaaaaaaaaaaaaaaaaa

SEQ ID NO: 1327 - DNA, 59 bp, synthetic construct
  misc_feature 1..59: note = Description of sequence: Primer
  source 1..59: mol_type = other DNA
atggacgacgacgacaagactttaagcccgcgttaaaaaaaaaaaaaaaaaaaaaaaaa

SEQ ID NO: 1328 - DNA, 59 bp, synthetic construct
  misc_feature 1..59: note = Description of sequence: Primer
  source 1..59: mol_type = other DNA
atggacgacgacgacaaggaaaacggtcttccgaaaaaaaaaaaaaaaaaaaaaaaaaa

SEQ ID NO: 1329 - DNA, 59 bp, synthetic construct
  misc_feature 1..59: note = Description of sequence: Primer
  source 1..59: mol_type = other DNA
atggacgacgacgacaagcctcactcgtgtttccaaaaaaaaaaaaaaaaaaaaaaaaa

SEQ ID NO: 1330 - DNA, 59 bp, synthetic construct
  misc_feature 1..59: note = Description of sequence: Primer
  source 1..59: mol_type = other DNA
atggacgacgacgacaaggttacatccggccagtaaaaaaaaaaaaaaaaaaaaaaaaa

SEQ ID NO: 1331 - DNA, 59 bp, synthetic construct
  misc_feature 1..59: note = Description of sequence: Primer
  source 1..59: mol_type = other DNA
atggacgacgacgacaagtccgagataatctaggaaaaaaaaaaaaaaaaaaaaaaaaa

SEQ ID NO: 1332 - DNA, 59 bp, synthetic construct
  misc_feature 1..59: note = Description of sequence: Primer
  source 1..59: mol_type = other DNA
atggacgacgacgacaaggcactatcacctcagaaaaaaaaaaaaaaaaaaaaaaaaaa

SEQ ID NO: 1333 - DNA, 59 bp, synthetic construct
  misc_feature 1..59: note = Description of sequence: Primer
  source 1..59: mol_type = other DNA
atggacgacgacgacaagtcaggaggtcgtacctaaaaaaaaaaaaaaaaaaaaaaaaa

SEQ ID NO: 1334 - DNA, 59 bp, synthetic construct
  misc_feature 1..59: note = Description of sequence: Primer
  source 1..59: mol_type = other DNA
atggacgacgacgacaagaattgtgctcatcgggaaaaaaaaaaaaaaaaaaaaaaaaa

SEQ ID NO: 1335 - DNA, 59 bp, synthetic construct
  misc_feature 1..59: note = Description of sequence: Primer
  source 1..59: mol_type = other DNA
atggacgacgacgacaagcggcccgattctaatcaaaaaaaaaaaaaaaaaaaaaaaaa

SEQ ID NO: 1336 - DNA, 59 bp, synthetic construct
  misc_feature 1..59: note = Description of sequence: Primer
  source 1..59: mol_type = other DNA
atggacgacgacgacaagtgtatggcagcaagacaaaaaaaaaaaaaaaaaaaaaaaaa

SEQ ID NO: 1337 - DNA, 59 bp, synthetic construct
  misc_feature 1..59: note = Description of sequence: Primer
  source 1..59: mol_type = other DNA
atggacgacgacgacaagcaaagaccgacgaattaaaaaaaaaaaaaaaaaaaaaaaaa

SEQ ID NO: 1338 - DNA, 59 bp, synthetic construct
  misc_feature 1..59: note = Description of sequence: Primer
  source 1..59: mol_type = other DNA
atggacgacgacgacaaggtgcctctgttcatggaaaaaaaaaaaaaaaaaaaaaaaaa

SEQ ID NO: 1339 - DNA, 59 bp, synthetic construct
  misc_feature 1..59: note = Description of sequence: Primer
  source 1..59: mol_type = other DNA
atggacgacgacgacaaggaacgaagtggtagtcaaaaaaaaaaaaaaaaaaaaaaaaa

SEQ ID NO: 1340 - DNA, 59 bp, synthetic construct
  misc_feature 1..59: note = Description of sequence: Primer
  source 1..59: mol_type = other DNA
atggacgacgacgacaaggtctcgactagatttgaaaaaaaaaaaaaaaaaaaaaaaaa

SEQ ID NO: 1341 - DNA, 59 bp, synthetic construct
  misc_feature 1..59: note = Description of sequence: Primer
  source 1..59: mol_type = other DNA
atggacgacgacgacaagcactcccgaatggtgtaaaaaaaaaaaaaaaaaaaaaaaaa

SEQ ID NO: 1342 - DNA, 59 bp, synthetic construct
  misc_feature 1..59: note = Description of sequence: Primer
  source 1..59: mol_type = other DNA
atggacgacgacgacaagaagaaagataaccgcgaaaaaaaaaaaaaaaaaaaaaaaaa

SEQ ID NO: 1343 - DNA, 59 bp, synthetic construct
  misc_feature 1..59: note = Description of sequence: Primer
  source 1..59: mol_type = other DNA
atggacgacgacgacaagaaccagagggagggataaaaaaaaaaaaaaaaaaaaaaaaa

SEQ ID NO: 1344 - DNA, 59 bp, synthetic construct
  misc_feature 1..59: note = Description of sequence: Primer
  source 1..59: mol_type = other DNA
atggacgacgacgacaaggctgtcgctacgaattaaaaaaaaaaaaaaaaaaaaaaaaa

SEQ ID NO: 1345 - DNA, 59 bp, synthetic construct
  misc_feature 1..59: note = Description of sequence: Primer
  source 1..59: mol_type = other DNA
atggacgacgacgacaagtctcccactggtgactaaaaaaaaaaaaaaaaaaaaaaaaa

SEQ ID NO: 1346 - DNA, 59 bp, synthetic construct
  misc_feature 1..59: note = Description of sequence: Primer
  source 1..59: mol_type = other DNA
atggacgacgacgacaagcagactaggaggagagaaaaaaaaaaaaaaaaaaaaaaaaa

SEQ ID NO: 1347 - DNA, 59 bp, synthetic construct
  misc_feature 1..59: note = Description of sequence: Primer
  source 1..59: mol_type = other DNA
atggacgacgacgacaaggcagacaggacatcagaaaaaaaaaaaaaaaaaaaaaaaaa

SEQ ID NO: 1348 - DNA, 59 bp, synthetic construct
  misc_feature 1..59: note = Description of sequence: Primer
  source 1..59: mol_type = other DNA
atggacgacgacgacaagtccatggaagtgtaccaaaaaaaaaaaaaaaaaaaaaaaaa

SEQ ID NO: 1349 - DNA, 59 bp, synthetic construct
  misc_feature 1..59: note = Description of sequence: Primer
  source 1..59: mol_type = other DNA
atggacgacgacgacaaggtcattgactgtagtcaaaaaaaaaaaaaaaaaaaaaaaaa

SEQ ID NO: 1350 - DNA, 59 bp, synthetic construct
  misc_feature 1..59: note = Description of sequence: Primer
  source 1..59: mol_type = other DNA
atggacgacgacgacaagctcggaccttttctcgaaaaaaaaaaaaaaaaaaaaaaaaa

SEQ ID NO: 1351 - DNA, 59 bp, synthetic construct
  misc_feature 1..59: note = Description of sequence: Primer
  source 1..59: mol_type = other DNA
atggacgacgacgacaagtgctgatggtaaaccgaaaaaaaaaaaaaaaaaaaaaaaaa

SEQ ID NO: 1352 - DNA, 59 bp, synthetic construct
  misc_feature 1..59: note = Description of sequence: Primer
  source 1..59: mol_type = other DNA
atggacgacgacgacaagggctttcggtggtacaaaaaaaaaaaaaaaaaaaaaaaaaa

SEQ ID NO: 1353 - DNA, 59 bp, synthetic construct
  misc_feature 1..59: note = Description of sequence: Primer
  source 1..59: mol_type = other DNA
atggacgacgacgacaagcacatccaaccagcacaaaaaaaaaaaaaaaaaaaaaaaaa

SEQ ID NO: 1354 - DNA, 59 bp, synthetic construct
  misc_feature 1..59: note = Description of sequence: Primer
  source 1..59: mol_type = other DNA
atggacgacgacgacaagaccatcccgaaacgagaaaaaaaaaaaaaaaaaaaaaaaaa

SEQ ID NO: 1355 - DNA, 59 bp, synthetic construct
  misc_feature 1..59: note = Description of sequence: Primer
  source 1..59: mol_type = other DNA
atggacgacgacgacaaggagctacctcacattaaaaaaaaaaaaaaaaaaaaaaaaaa

SEQ ID NO: 1356 - DNA, 59 bp, synthetic construct
  misc_feature 1..59: note = Description of sequence: Primer
  source 1..59: mol_type = other DNA
atggacgacgacgacaaggatagtaccatgcgttaaaaaaaaaaaaaaaaaaaaaaaaa

SEQ ID NO: 1357 - DNA, 59 bp, synthetic construct
  misc_feature 1..59: note = Description of sequence: Primer
  source 1..59: mol_type = other DNA
atggacgacgacgacaaggacataggaggtcatgaaaaaaaaaaaaaaaaaaaaaaaaa

SEQ ID NO: 1358 - DNA, 59 bp, synthetic construct
  misc_feature 1..59: note = Description of sequence: Primer
  source 1..59: mol_type = other DNA
atggacgacgacgacaagtgtcgtatcactatccaaaaaaaaaaaaaaaaaaaaaaaaa

SEQ ID NO: 1359 - DNA, 59 bp, synthetic construct
  misc_feature 1..59: note = Description of sequence: Primer
  source 1..59: mol_type = other DNA
atggacgacgacgacaagctgcaagtgggcgaataaaaaaaaaaaaaaaaaaaaaaaaa

SEQ ID NO: 1360 - DNA, 59 bp, synthetic construct
  misc_feature 1..59: note = Description of sequence: Primer
  source 1..59: mol_type = other DNA
atggacgacgacgacaagagatccgataacgtacaaaaaaaaaaaaaaaaaaaaaaaaa

SEQ ID NO: 1361 - DNA, 59 bp, synthetic construct
  misc_feature 1..59: note = Description of sequence: Primer
  source 1..59: mol_type = other DNA
atggacgacgacgacaagattgtaggtgcccaccaaaaaaaaaaaaaaaaaaaaaaaaa

SEQ ID NO: 1362 - DNA, 59 bp, synthetic construct
  misc_feature 1..59: note = Description of sequence: Primer
  source 1..59: mol_type = other DNA
atggacgacgacgacaagaaagtaacaacgggagaaaaaaaaaaaaaaaaaaaaaaaaa

SEQ ID NO: 1363 - DNA, 59 bp, synthetic construct
  misc_feature 1..59: note = Description of sequence: Primer
  source 1..59: mol_type = other DNA
atggacgacgacgacaagtttccaatttgcgctcaaaaaaaaaaaaaaaaaaaaaaaaa

SEQ ID NO: 1364 - DNA, 59 bp, synthetic construct
  misc_feature 1..59: note = Description of sequence: Primer
  source 1..59: mol_type = other DNA
atggacgacgacgacaagttgcagctctctcgagaaaaaaaaaaaaaaaaaaaaaaaaa

SEQ ID NO: 1365 - DNA, 59 bp, synthetic construct
  misc_feature 1..59: note = Description of sequence: Primer
  source 1..59: mol_type = other DNA
atggacgacgacgacaagaccatccttgcatttcaaaaaaaaaaaaaaaaaaaaaaaaa

SEQ ID NO: 1366 - DNA, 59 bp, synthetic construct
  misc_feature 1..59: note = Description of sequence: Primer
  source 1..59: mol_type = other DNA
atggacgacgacgacaagtcctcggtttgtccagaaaaaaaaaaaaaaaaaaaaaaaaa

SEQ ID NO: 1367 - DNA, 59 bp, synthetic construct
  misc_feature 1..59: note = Description of sequence: Primer
  source 1..59: mol_type = other DNA
atggacgacgacgacaagtactcatccgtgaactaaaaaaaaaaaaaaaaaaaaaaaaa

SEQ ID NO: 1368 - DNA, 59 bp, synthetic construct
  misc_feature 1..59: note = Description of sequence: Primer
  source 1..59: mol_type = other DNA
atggacgacgacgacaagtgttacctagtccctgaaaaaaaaaaaaaaaaaaaaaaaaa

SEQ ID NO: 1369 - DNA, 59 bp, synthetic construct
  misc_feature 1..59: note = Description of sequence: Primer
  source 1..59: mol_type = other DNA
atggacgacgacgacaagacctataacgtgggcgaaaaaaaaaaaaaaaaaaaaaaaaa

SEQ ID NO: 1370 - DNA, 59 bp, synthetic construct
  misc_feature 1..59: note = Description of sequence: Primer
  source 1..59: mol_type = other DNA
atggacgacgacgacaagcaaggttgctgtgtgcaaaaaaaaaaaaaaaaaaaaaaaaa

SEQ ID NO: 1371 - DNA, 59 bp, synthetic construct
  misc_feature 1..59: note = Description of sequence: Primer
  source 1..59: mol_type = other DNA
atggacgacgacgacaagacgcagttgcacacttaaaaaaaaaaaaaaaaaaaaaaaaa

SEQ ID NO: 1372 - DNA, 59 bp, synthetic construct
  misc_feature 1..59: note = Description of sequence: Primer
  source 1..59: mol_type = other DNA
atggacgacgacgacaagaagggtcaggtgaggaaaaaaaaaaaaaaaaaaaaaaaaaa

SEQ ID NO: 1373 - DNA, 59 bp, synthetic construct
  misc_feature 1..59: note = Description of sequence: Primer
  source 1..59: mol_type = other DNA
atggacgacgacgacaagtgttgaggctgcaggaaaaaaaaaaaaaaaaaaaaaaaaaa

SEQ ID NO: 1374 - DNA, 59 bp, synthetic construct
  misc_feature 1..59: note = Description of sequence: Primer
  source 1..59: mol_type = other DNA
atggacgacgacgacaaggtccgagtgtattctgaaaaaaaaaaaaaaaaaaaaaaaaa

SEQ ID NO: 1375 - DNA, 59 bp, synthetic construct
  misc_feature 1..59: note = Description of sequence: Primer
  source 1..59: mol_type = other DNA
atggacgacgacgacaagtcaagaacctagcgagaaaaaaaaaaaaaaaaaaaaaaaaa

SEQ ID NO: 1376 - DNA, 59 bp, synthetic construct
  misc_feature 1..59: note = Description of sequence: Primer
  source 1..59: mol_type = other DNA
atggacgacgacgacaagtcttatatgaggcgtgaaaaaaaaaaaaaaaaaaaaaaaaa

SEQ ID NO: 1377 - DNA, 59 bp, synthetic construct
  misc_feature 1..59: note = Description of sequence: Primer
  source 1..59: mol_type = other DNA
atggacgacgacgacaagttatgtcgcgttccgtaaaaaaaaaaaaaaaaaaaaaaaaa

SEQ ID NO: 1378 - DNA, 59 bp, synthetic construct
  misc_feature 1..59: note = Description of sequence: Primer
  source 1..59: mol_type = other DNA
atggacgacgacgacaagcattgctcagccacacaaaaaaaaaaaaaaaaaaaaaaaaa

SEQ ID NO: 1379 - DNA, 59 bp, synthetic construct
  misc_feature 1..59: note = Description of sequence: Primer
  source 1..59: mol_type = other DNA
atggacgacgacgacaagtttatgcacacttgccaaaaaaaaaaaaaaaaaaaaaaaaa

SEQ ID NO: 1380 - DNA, 59 bp, synthetic construct
  misc_feature 1..59: note = Description of sequence: Primer
  source 1..59: mol_type = other DNA
atggacgacgacgacaagagttatcgggcacgataaaaaaaaaaaaaaaaaaaaaaaaa

SEQ ID NO: 1381 - DNA, 59 bp, synthetic construct
  misc_feature 1..59: note = Description of sequence: Primer
  source 1..59: mol_type = other DNA
atggacgacgacgacaagttggcatcccgattctaaaaaaaaaaaaaaaaaaaaaaaaa

SEQ ID NO: 1382 - DNA, 59 bp, synthetic construct
  misc_feature 1..59: note = Description of sequence: Primer
  source 1..59: mol_type = other DNA
atggacgacgacgacaagaatgtacgaagtccctaaaaaaaaaaaaaaaaaaaaaaaaa

SEQ ID NO: 1383 - DNA, 59 bp, synthetic construct
  misc_feature 1..59: note = Description of sequence: Primer
  source 1..59: mol_type = other DNA
atggacgacgacgacaaggatgaatggccttcttaaaaaaaaaaaaaaaaaaaaaaaaa

SEQ ID NO: 1384 - DNA, 59 bp, synthetic construct
  misc_feature 1..59: note = Description of sequence: Primer
  source 1..59: mol_type = other DNA
atggacgacgacgacaagaaacgtcaacctcgccaaaaaaaaaaaaaaaaaaaaaaaaa

SEQ ID NO: 1385 - DNA, 59 bp, synthetic construct
  misc_feature 1..59: note = Description of sequence: Primer
  source 1..59: mol_type = other DNA
atggacgacgacgacaagcacgttcgccagaaataaaaaaaaaaaaaaaaaaaaaaaaa

SEQ ID NO: 1386 - DNA, 59 bp, synthetic construct
  misc_feature 1..59: note = Description of sequence: Primer
  source 1..59: mol_type = other DNA
atggacgacgacgacaagcagatctaaatgcacgaaaaaaaaaaaaaaaaaaaaaaaaa

SEQ ID NO: 1387 - DNA, 59 bp, synthetic construct
  misc_feature 1..59: note = Description of sequence: Primer
  source 1..59: mol_type = other DNA
atggacgacgacgacaagattctcgcaactgtctaaaaaaaaaaaaaaaaaaaaaaaaa

SEQ ID NO: 1388 - DNA, 59 bp, synthetic construct
  misc_feature 1..59: note = Description of sequence: Primer
  source 1..59: mol_type = other DNA
atggacgacgacgacaagagcatggttcccaactaaaaaaaaaaaaaaaaaaaaaaaaa

SEQ ID NO: 1389 - DNA, 59 bp, synthetic construct
  misc_feature 1..59: note = Description of sequence: Primer
  source 1..59: mol_type = other DNA
atggacgacgacgacaagagggaatgcttgatctaaaaaaaaaaaaaaaaaaaaaaaaa

SEQ ID NO: 1390 - DNA, 59 bp, synthetic construct
  misc_feature 1..59: note = Description of sequence: Primer
  source 1..59: mol_type = other DNA
atggacgacgacgacaagccccacagtattcagcaaaaaaaaaaaaaaaaaaaaaaaaa

SEQ ID NO: 1391 - DNA, 59 bp, synthetic construct
  misc_feature 1..59: note = Description of sequence: Primer
  source 1..59: mol_type = other DNA
atggacgacgacgacaagagcgtactggacaagcaaaaaaaaaaaaaaaaaaaaaaaaa

SEQ ID NO: 1392 - DNA, 59 bp, synthetic construct
  misc_feature 1..59: note = Description of sequence: Primer
  source 1..59: mol_type = other DNA
atggacgacgacgacaagcggttcatcgttgaccaaaaaaaaaaaaaaaaaaaaaaaaa

SEQ ID NO: 1393 - DNA, 59 bp, synthetic construct
  misc_feature 1..59: note = Description of sequence: Primer
  source 1..59: mol_type = other DNA
atggacgacgacgacaaggggtgtactaggtaataaaaaaaaaaaaaaaaaaaaaaaaa

SEQ ID NO: 1394 - DNA, 59 bp, synthetic construct
  misc_feature 1..59: note = Description of sequence: Primer
  source 1..59: mol_type = other DNA
atggacgacgacgacaagccatctggattagactaaaaaaaaaaaaaaaaaaaaaaaaa

SEQ ID NO: 1395 - DNA, 59 bp, synthetic construct
  misc_feature 1..59: note = Description of sequence: Primer
  source 1..59: mol_type = other DNA
atggacgacgacgacaaggatgcgaagcgcatacaaaaaaaaaaaaaaaaaaaaaaaaa

SEQ ID NO: 1396 - DNA, 59 bp, synthetic construct
  misc_feature 1..59: note = Description of sequence: Primer
  source 1..59: mol_type = other DNA
atggacgacgacgacaagcataccacgcctatgtaaaaaaaaaaaaaaaaaaaaaaaaa

SEQ ID NO: 1397 - DNA, 59 bp, synthetic construct
  misc_feature 1..59: note = Description of sequence: Primer
  source 1..59: mol_type = other DNA
atggacgacgacgacaaggaagtggtcttcaggtaaaaaaaaaaaaaaaaaaaaaaaaa

SEQ ID NO: 1398 - DNA, 59 bp, synthetic construct
  misc_feature 1..59: note = Description of sequence: Primer
  source 1..59: mol_type = other DNA
atggacgacgacgacaagtcgctgagccgcaaataaaaaaaaaaaaaaaaaaaaaaaaa

SEQ ID NO: 1399 - DNA, 59 bp, synthetic construct
  misc_feature 1..59: note = Description of sequence: Primer
  source 1..59: mol_type = other DNA
atggacgacgacgacaagttatggagcctgttcgaaaaaaaaaaaaaaaaaaaaaaaaa

SEQ ID NO: 1400 - DNA, 59 bp, synthetic construct
  misc_feature 1..59: note = Description of sequence: Primer
  source 1..59: mol_type = other DNA
atggacgacgacgacaaggaagcccataggaggtaaaaaaaaaaaaaaaaaaaaaaaaa

SEQ ID NO: 1401 - DNA, 59 bp, synthetic construct
  misc_feature 1..59: note = Description of sequence: Primer
  source 1..59: mol_type = other DNA
atggacgacgacgacaaggccgtgacagtggtttaaaaaaaaaaaaaaaaaaaaaaaaa

SEQ ID NO: 1402 - DNA, 59 bp, synthetic construct
  misc_feature 1..59: note = Description of sequence: Primer
  source 1..59: mol_type = other DNA
atggacgacgacgacaagaagtcgacctctatcgaaaaaaaaaaaaaaaaaaaaaaaaa

SEQ ID NO: 1403 - DNA, 59 bp, synthetic construct
  misc_feature 1..59: note = Description of sequence: Primer
  source 1..59: mol_type = other DNA
atggacgacgacgacaagcattgactttcgagcgaaaaaaaaaaaaaaaaaaaaaaaaa

SEQ ID NO: 1404 - DNA, 59 bp, synthetic construct
  misc_feature 1..59: note = Description of sequence: Primer
  source 1..59: mol_type = other DNA
atggacgacgacgacaagattaaacagggagctgaaaaaaaaaaaaaaaaaaaaaaaaa

SEQ ID NO: 1405 - DNA, 59 bp, synthetic construct
  misc_feature 1..59: note = Description of sequence: Primer
  source 1..59: mol_type = other DNA
atggacgacgacgacaagacaatccgaggtctgaaaaaaaaaaaaaaaaaaaaaaaaaa

SEQ ID NO: 1406 - DNA, 59 bp, synthetic construct
  misc_feature 1..59: note = Description of sequence: Primer
  source 1..59: mol_type = other DNA
atggacgacgacgacaaggaagggcaaggtttctaaaaaaaaaaaaaaaaaaaaaaaaa

SEQ ID NO: 1407 - DNA, 59 bp, synthetic construct
  misc_feature 1..59: note = Description of sequence: Primer
  source 1..59: mol_type = other DNA
atggacgacgacgacaaggtggaaaaccgagataaaaaaaaaaaaaaaaaaaaaaaaaa

SEQ ID NO: 1408 - DNA, 59 bp, synthetic construct
  misc_feature 1..59: note = Description of sequence: Primer
  source 1..59: mol_type = other DNA
atggacgacgacgacaagaccattactcgtaagcaaaaaaaaaaaaaaaaaaaaaaaaa

SEQ ID NO: 1409 - DNA, 59 bp, synthetic construct
  misc_feature 1..59: note = Description of sequence: Primer
  source 1..59: mol_type = other DNA
atggacgacgacgacaagcgtccgatgacctcttaaaaaaaaaaaaaaaaaaaaaaaaa

SEQ ID NO: 1410 - DNA, 59 bp, synthetic construct
  misc_feature 1..59: note = Description of sequence: Primer
  source 1..59: mol_type = other DNA
atggacgacgacgacaagtgtggcgcttacaaacaaaaaaaaaaaaaaaaaaaaaaaaa

SEQ ID NO: 1411 - DNA, 59 bp, synthetic construct
  misc_feature 1..59: note = Description of sequence: Primer
  source 1..59: mol_type = other DNA
atggacgacgacgacaagattcacatgtgcaggaaaaaaaaaaaaaaaaaaaaaaaaaa

SEQ ID NO: 1412 - DNA, 59 bp, synthetic construct
  misc_feature 1..59: note = Description of sequence: Primer
  source 1..59: mol_type = other DNA
atggacgacgacgacaagctaccacacaagctccaaaaaaaaaaaaaaaaaaaaaaaaa

SEQ ID NO: 1413 - DNA, 59 bp, synthetic construct
  misc_feature 1..59: note = Description of sequence: Primer
  source 1..59: mol_type = other DNA
atggacgacgacgacaagggatggtaattcgcttaaaaaaaaaaaaaaaaaaaaaaaaa

SEQ ID NO: 1414 - DNA, 59 bp, synthetic construct
  misc_feature 1..59: note = Description of sequence: Primer
  source 1..59: mol_type = other DNA
atggacgacgacgacaagttcaaaggtttgacgcaaaaaaaaaaaaaaaaaaaaaaaaa

SEQ ID NO: 1415 - DNA, 59 bp, synthetic construct
  misc_feature 1..59: note = Description of sequence: Primer
  source 1..59: mol_type = other DNA
atggacgacgacgacaaggtctgcagcaatctctaaaaaaaaaaaaaaaaaaaaaaaaa

SEQ ID NO: 1416 - DNA, 59 bp, synthetic construct
  misc_feature 1..59: note = Description of sequence: Primer
  source 1..59: mol_type = other DNA
atggacgacgacgacaaggacagtcgtaactgggaaaaaaaaaaaaaaaaaaaaaaaaa

SEQ ID NO: 1417 - DNA, 59 bp, synthetic construct
  misc_feature 1..59: note = Description of sequence: Primer
  source 1..59: mol_type = other DNA
atggacgacgacgacaagagtgcttgtaaagagcaaaaaaaaaaaaaaaaaaaaaaaaa

SEQ ID NO: 1418 - DNA, 59 bp, synthetic construct
  misc_feature 1..59: note = Description of sequence: Primer
  source 1..59: mol_type = other DNA
atggacgacgacgacaaggtaggagctgcctttgaaaaaaaaaaaaaaaaaaaaaaaaa

SEQ ID NO: 1419 - DNA, 59 bp, synthetic construct
  misc_feature 1..59: note = Description of sequence: Primer
  source 1..59: mol_type = other DNA
atggacgacgacgacaagccactttcgtagacataaaaaaaaaaaaaaaaaaaaaaaaa

SEQ ID NO: 1420 - DNA, 59 bp, synthetic construct
  misc_feature 1..59: note = Description of sequence: Primer
  source 1..59: mol_type = other DNA
atggacgacgacgacaagtgattagcgtggttacaaaaaaaaaaaaaaaaaaaaaaaaa

SEQ ID NO: 1421 - DNA, 59 bp, synthetic construct
  misc_feature 1..59: note = Description of sequence: Primer
  source 1..59: mol_type = other DNA
atggacgacgacgacaagaaaggcagtaagaaccaaaaaaaaaaaaaaaaaaaaaaaaa

SEQ ID NO: 1422 - DNA, 59 bp, synthetic construct
  misc_feature 1..59: note = Description of sequence: Primer
  source 1..59: mol_type = other DNA
atggacgacgacgacaagcgtagtttagggcccaaaaaaaaaaaaaaaaaaaaaaaaaa

SEQ ID NO: 1423 - DNA, 59 bp, synthetic construct
  misc_feature 1..59: note = Description of sequence: Primer
  source 1..59: mol_type = other DNA
atggacgacgacgacaaggtcataatcccgttccaaaaaaaaaaaaaaaaaaaaaaaaa

SEQ ID NO: 1424 - DNA, 59 bp, synthetic construct
  misc_feature 1..59: note = Description of sequence: Primer
  source 1..59: mol_type = other DNA
atggacgacgacgacaagttgatacgttccctggaaaaaaaaaaaaaaaaaaaaaaaaa

SEQ ID NO: 1425 - DNA, 59 bp, synthetic construct
  misc_feature 1..59: note = Description of sequence: Primer
  source 1..59: mol_type = other DNA
atggacgacgacgacaagaacgataggatcgcgaaaaaaaaaaaaaaaaaaaaaaaaaa

SEQ ID NO: 1426 - DNA, 59 bp, synthetic construct
  misc_feature 1..59: note = Description of sequence: Primer
  source 1..59: mol_type = other DNA
atggacgacgacgacaagagaatttagggcgcctaaaaaaaaaaaaaaaaaaaaaaaaa

SEQ ID NO: 1427 - DNA, 59 bp, synthetic construct
  misc_feature 1..59: note = Description of sequence: Primer
  source 1..59: mol_type = other DNA
atggacgacgacgacaagctagcatttagacccaaaaaaaaaaaaaaaaaaaaaaaaaa

SEQ ID NO: 1428 - DNA, 59 bp, synthetic construct
  misc_feature 1..59: note = Description of sequence: Primer
  source 1..59: mol_type = other DNA
atggacgacgacgacaagaccgtttgacggtttgaaaaaaaaaaaaaaaaaaaaaaaaa

SEQ ID NO: 1429 - DNA, 59 bp, synthetic construct
  misc_feature 1..59: note = Description of sequence: Primer
  source 1..59: mol_type = other DNA
atggacgacgacgacaaggtggtagcatgctagcaaaaaaaaaaaaaaaaaaaaaaaaa

SEQ ID NO: 1430 - DNA, 59 bp, synthetic construct
  misc_feature 1..59: note = Description of sequence: Primer
  source 1..59: mol_type = other DNA
atggacgacgacgacaagctgtttcgtaccagtcaaaaaaaaaaaaaaaaaaaaaaaaa

SEQ ID NO: 1431 - DNA, 59 bp, synthetic construct
  misc_feature 1..59: note = Description of sequence: Primer
  source 1..59: mol_type = other DNA
atggacgacgacgacaagattacgtccgagagagaaaaaaaaaaaaaaaaaaaaaaaaa

SEQ ID NO: 1432 - DNA, 59 bp, synthetic construct
  misc_feature 1..59: note = Description of sequence: Primer
  source 1..59: mol_type = other DNA
atggacgacgacgacaagggacttattcgacactaaaaaaaaaaaaaaaaaaaaaaaaa

SEQ ID NO: 1433 - DNA, 59 bp, synthetic construct
  misc_feature 1..59: note = Description of sequence: Primer
  source 1..59: mol_type = other DNA
atggacgacgacgacaagccattgacaggacgagaaaaaaaaaaaaaaaaaaaaaaaaa

SEQ ID NO: 1434 - DNA, 59 bp, synthetic construct
  misc_feature 1..59: note = Description of sequence: Primer
  source 1..59: mol_type = other DNA
atggacgacgacgacaagagcgtgaaatcgtgctaaaaaaaaaaaaaaaaaaaaaaaaa

SEQ ID NO: 1435 - DNA, 59 bp, synthetic construct
  misc_feature 1..59: note = Description of sequence: Primer
  source 1..59: mol_type = other DNA
atggacgacgacgacaagctggttataaggggttaaaaaaaaaaaaaaaaaaaaaaaaa

SEQ ID NO: 1436 - DNA, 59 bp, synthetic construct
  misc_feature 1..59: note = Description of sequence: Primer
  source 1..59: mol_type = other DNA
atggacgacgacgacaagctgcgcatccgtactaaaaaaaaaaaaaaaaaaaaaaaaaa

SEQ ID NO: 1437 - DNA, 59 bp, synthetic construct
  misc_feature 1..59: note = Description of sequence: Primer
  source 1..59: mol_type = other DNA
atggacgacgacgacaagatcccacagcctaatgaaaaaaaaaaaaaaaaaaaaaaaaa

SEQ ID NO: 1438 - DNA, 59 bp, synthetic construct
  misc_feature 1..59: note = Description of sequence: Primer
  source 1..59: mol_type = other DNA
atggacgacgacgacaagatgcgtaatcaggaacaaaaaaaaaaaaaaaaaaaaaaaaa

SEQ ID NO: 1439 - DNA, 59 bp, synthetic construct
  misc_feature 1..59: note = Description of sequence: Primer
  source 1..59: mol_type = other DNA
atggacgacgacgacaagacgccgtgaactgaacaaaaaaaaaaaaaaaaaaaaaaaaa

SEQ ID NO: 1440 - DNA, 59 bp, synthetic construct
  misc_feature 1..59: note = Description of sequence: Primer
  source 1..59: mol_type = other DNA
atggacgacgacgacaagatagcccggcaatgcaaaaaaaaaaaaaaaaaaaaaaaaaa

SEQ ID NO: 1441 - DNA, 59 bp, synthetic construct
  misc_feature 1..59: note = Description of sequence: Primer
  source 1..59: mol_type = other DNA
atggacgacgacgacaagcacctcaaagtcagccaaaaaaaaaaaaaaaaaaaaaaaaa

SEQ ID NO: 1442 - DNA, 59 bp, synthetic construct
  misc_feature 1..59: note = Description of sequence: Primer
  source 1..59: mol_type = other DNA
atggacgacgacgacaagttccaaggacgtggaaaaaaaaaaaaaaaaaaaaaaaaaaa

SEQ ID NO: 1443 - DNA, 59 bp, synthetic construct
  misc_feature 1..59: note = Description of sequence: Primer
  source 1..59: mol_type = other DNA
atggacgacgacgacaagagagagatgctaaccgaaaaaaaaaaaaaaaaaaaaaaaaa

SEQ ID NO: 1444 - DNA, 59 bp, synthetic construct
  misc_feature 1..59: note = Description of sequence: Primer
  source 1..59: mol_type = other DNA
atggacgacgacgacaaggttccggaactgtcctaaaaaaaaaaaaaaaaaaaaaaaaa

SEQ ID NO: 1445 - DNA, 59 bp, synthetic construct
  misc_feature 1..59: note = Description of sequence: Primer
  source 1..59: mol_type = other DNA
atggacgacgacgacaagggatggtcctgaatccaaaaaaaaaaaaaaaaaaaaaaaaa

SEQ ID NO: 1446 - DNA, 59 bp, synthetic construct
  misc_feature 1..59: note = Description of sequence: Primer
  source 1..59: mol_type = other DNA
atggacgacgacgacaagattttggcggtgggtcaaaaaaaaaaaaaaaaaaaaaaaaa

SEQ ID NO: 1447 - DNA, 59 bp, synthetic construct
  misc_feature 1..59: note = Description of sequence: Primer
  source 1..59: mol_type = other DNA
atggacgacgacgacaagaatcgattgcgtacggaaaaaaaaaaaaaaaaaaaaaaaaa

SEQ ID NO: 1448 - DNA, 59 bp, synthetic construct
  misc_feature 1..59: note = Description of sequence: Primer
  source 1..59: mol_type = other DNA
atggacgacgacgacaagtggagccgttattacgaaaaaaaaaaaaaaaaaaaaaaaaa

SEQ ID NO: 1449 - DNA, 59 bp, synthetic construct
  misc_feature 1..59: note = Description of sequence: Primer
  source 1..59: mol_type = other DNA
atggacgacgacgacaagaggcattgtgactggtaaaaaaaaaaaaaaaaaaaaaaaaa

SEQ ID NO: 1450 - DNA, 59 bp, synthetic construct
  misc_feature 1..59: note = Description of sequence: Primer
  source 1..59: mol_type = other DNA
atggacgacgacgacaaggactgctgtccaaaataaaaaaaaaaaaaaaaaaaaaaaaa

SEQ ID NO: 1451 - DNA, 59 bp, synthetic construct
  misc_feature 1..59: note = Description of sequence: Primer
  source 1..59: mol_type = other DNA
atggacgacgacgacaagccctttgcgtcccattaaaaaaaaaaaaaaaaaaaaaaaaa

SEQ ID NO: 1452 - DNA, 59 bp, synthetic construct
  misc_feature 1..59: note = Description of sequence: Primer
  source 1..59: mol_type = other DNA
atggacgacgacgacaagttgcaagcggctaccaaaaaaaaaaaaaaaaaaaaaaaaaa

SEQ ID NO: 1453 - DNA, 59 bp, synthetic construct
  misc_feature 1..59: note = Description of sequence: Primer
  source 1..59: mol_type = other DNA
atggacgacgacgacaagttggcgcatttatcggaaaaaaaaaaaaaaaaaaaaaaaaa

SEQ ID NO: 1454 - DNA, 59 bp, synthetic construct
  misc_feature 1..59: note = Description of sequence: Primer
  source 1..59: mol_type = other DNA
atggacgacgacgacaagcaacatcttaggtctcaaaaaaaaaaaaaaaaaaaaaaaaa

SEQ ID NO: 1455 - DNA, 59 bp, synthetic construct
  misc_feature 1..59: note = Description of sequence: Primer
  source 1..59: mol_type = other DNA
atggacgacgacgacaaggtaatccgtcaggagtaaaaaaaaaaaaaaaaaaaaaaaaa

SEQ ID NO: 1456 - DNA, 59 bp, synthetic construct
  misc_feature 1..59: note = Description of sequence: Primer
  source 1..59: mol_type = other DNA
atggacgacgacgacaagcactgtcacgtacacaaaaaaaaaaaaaaaaaaaaaaaaaa

SEQ ID NO: 1457 - DNA, 59 bp, synthetic construct
  misc_feature 1..59: note = Description of sequence: Primer
  source 1..59: mol_type = other DNA
atggacgacgacgacaagggtgaggggatagtaaaaaaaaaaaaaaaaaaaaaaaaaaa

SEQ ID NO: 1458 - DNA, 59 bp, synthetic construct
  misc_feature 1..59: note = Description of sequence: Primer
  source 1..59: mol_type = other DNA
atggacgacgacgacaagatgggcacatattctcaaaaaaaaaaaaaaaaaaaaaaaaa

SEQ ID NO: 1459 - DNA, 59 bp, synthetic construct
  misc_feature 1..59: note = Description of sequence: Primer
  source 1..59: mol_type = other DNA
atggacgacgacgacaagaaaacgcctatcactcaaaaaaaaaaaaaaaaaaaaaaaaa

SEQ ID NO: 1460 - DNA, 59 bp, synthetic construct
  misc_feature 1..59: note = Description of sequence: Primer
  source 1..59: mol_type = other DNA
atggacgacgacgacaagctctctttgatccgtaaaaaaaaaaaaaaaaaaaaaaaaaa

SEQ ID NO: 1461 - DNA, 59 bp, synthetic construct
  misc_feature 1..59: note = Description of sequence: Primer
  source 1..59: mol_type = other DNA
atggacgacgacgacaagcttacgaggctaccgaaaaaaaaaaaaaaaaaaaaaaaaaa

SEQ ID NO: 1462 - DNA, 59 bp, synthetic construct
  misc_feature 1..59: note = Description of sequence: Primer
  source 1..59: mol_type = other DNA
atggacgacgacgacaagtgtctagctgaggcaaaaaaaaaaaaaaaaaaaaaaaaaaa

SEQ ID NO: 1463 - DNA, 59 bp, synthetic construct
  misc_feature 1..59: note = Description of sequence: Primer
  source 1..59: mol_type = other DNA
atggacgacgacgacaaggtaggacagatccgcaaaaaaaaaaaaaaaaaaaaaaaaaa

SEQ ID NO: 1464 - DNA, 59 bp, synthetic construct
  misc_feature 1..59: note = Description of sequence: Primer
  source 1..59: mol_type = other DNA
atggacgacgacgacaaggtacccatgtcttaacaaaaaaaaaaaaaaaaaaaaaaaaa

SEQ ID NO: 1465 - DNA, 59 bp, synthetic construct
  misc_feature 1..59: note = Description of sequence: Primer
  source 1..59: mol_type = other DNA
atggacgacgacgacaagagacctctcggtgaataaaaaaaaaaaaaaaaaaaaaaaaa

SEQ ID NO: 1466 - DNA, 59 bp, synthetic construct
  misc_feature 1..59: note = Description of sequence: Primer
  source 1..59: mol_type = other DNA
atggacgacgacgacaaggggtcgattcacttgaaaaaaaaaaaaaaaaaaaaaaaaaa

SEQ ID NO: 1467 - DNA, 59 bp, synthetic construct
  misc_feature 1..59: note = Description of sequence: Primer
  source 1..59: mol_type = other DNA
atggacgacgacgacaagtcgatacgccaaggtgaaaaaaaaaaaaaaaaaaaaaaaaa

SEQ ID NO: 1468 - DNA, 59 bp, synthetic construct
  misc_feature 1..59: note = Description of sequence: Primer
  source 1..59: mol_type = other DNA
atggacgacgacgacaagtgtttgtagccgcctgaaaaaaaaaaaaaaaaaaaaaaaaa

SEQ ID NO: 1469 - DNA, 59 bp, synthetic construct
  misc_feature 1..59: note = Description of sequence: Primer
  source 1..59: mol_type = other DNA
atggacgacgacgacaagaattctgcctcctcaaaaaaaaaaaaaaaaaaaaaaaaaaa

SEQ ID NO: 1470 - DNA, 59 bp, synthetic construct
  misc_feature 1..59: note = Description of sequence: Primer
  source 1..59: mol_type = other DNA
atggacgacgacgacaagctccgaaaagttgcagaaaaaaaaaaaaaaaaaaaaaaaaa

SEQ ID NO: 1471 - DNA, 59 bp, synthetic construct
  misc_feature 1..59: note = Description of sequence: Primer
  source 1..59: mol_type = other DNA
atggacgacgacgacaagaagccggtcatagcctaaaaaaaaaaaaaaaaaaaaaaaaa

SEQ ID NO: 1472 - DNA, 59 bp, synthetic construct
  misc_feature 1..59: note = Description of sequence: Primer
  source 1..59: mol_type = other DNA
atggacgacgacgacaagcatcagtaggtgacgcaaaaaaaaaaaaaaaaaaaaaaaaa

SEQ ID NO: 1473 - DNA, 59 bp, synthetic construct
  misc_feature 1..59: note = Description of sequence: Primer
  source 1..59: mol_type = other DNA
atggacgacgacgacaagaatcggcgcattgggaaaaaaaaaaaaaaaaaaaaaaaaaa

SEQ ID NO: 1474 - DNA, 59 bp, synthetic construct
  misc_feature 1..59: note = Description of sequence: Primer
  source 1..59: mol_type = other DNA
atggacgacgacgacaaggaaattgaggtcctgcaaaaaaaaaaaaaaaaaaaaaaaaa

SEQ ID NO: 1475 - DNA, 59 bp, synthetic construct
  misc_feature 1..59: note = Description of sequence: Primer
  source 1..59: mol_type = other DNA
atggacgacgacgacaagacctgcgtgactcttgaaaaaaaaaaaaaaaaaaaaaaaaa

SEQ ID NO: 1476 - DNA, 59 bp, synthetic construct
  misc_feature 1..59: note = Description of sequence: Primer
  source 1..59: mol_type = other DNA
atggacgacgacgacaaggcgcgggtaatcatacaaaaaaaaaaaaaaaaaaaaaaaaa

SEQ ID NO: 1477 - DNA, 59 bp, synthetic construct
  misc_feature 1..59: note = Description of sequence: Primer
  source 1..59: mol_type = other DNA
atggacgacgacgacaagtcttaggctttcgtgcaaaaaaaaaaaaaaaaaaaaaaaaa

SEQ ID NO: 1478 - DNA, 59 bp, synthetic construct
  misc_feature 1..59: note = Description of sequence: Primer
  source 1..59: mol_type = other DNA
atggacgacgacgacaagccgaagacactgtcgtaaaaaaaaaaaaaaaaaaaaaaaaa

SEQ ID NO: 1479 - DNA, 59 bp, synthetic construct
  misc_feature 1..59: note = Description of sequence: Primer
  source 1..59: mol_type = other DNA
atggacgacgacgacaagtcatttccccgcctctaaaaaaaaaaaaaaaaaaaaaaaaa

SEQ ID NO: 1480 - DNA, 59 bp, synthetic construct
  misc_feature 1..59: note = Description of sequence: Primer
  source 1..59: mol_type = other DNA
atggacgacgacgacaagccttgtgcgtatgtaaaaaaaaaaaaaaaaaaaaaaaaaaa

SEQ ID NO: 1481 - DNA, 59 bp, synthetic construct
  misc_feature 1..59: note = Description of sequence: Primer
  source 1..59: mol_type = other DNA
atggacgacgacgacaagtgcgttggtctaaaggaaaaaaaaaaaaaaaaaaaaaaaaa

SEQ ID NO: 1482 - DNA, 59 bp, synthetic construct
  misc_feature 1..59: note = Description of sequence: Primer
  source 1..59: mol_type = other DNA
atggacgacgacgacaagccctactaacaatgtcaaaaaaaaaaaaaaaaaaaaaaaaa

SEQ ID NO: 1483 - DNA, 59 bp, synthetic construct
  misc_feature 1..59: note = Description of sequence: Primer
  source 1..59: mol_type = other DNA
atggacgacgacgacaagtcctcttagcttgggcaaaaaaaaaaaaaaaaaaaaaaaaa

SEQ ID NO: 1484 - DNA, 59 bp, synthetic construct
  misc_feature 1..59: note = Description of sequence: Primer
  source 1..59: mol_type = other DNA
atggacgacgacgacaagctcttacccgcgataaaaaaaaaaaaaaaaaaaaaaaaaaa

SEQ ID NO: 1485 - DNA, 59 bp, synthetic construct
  misc_feature 1..59: note = Description of sequence: Primer
  source 1..59: mol_type = other DNA
atggacgacgacgacaagtctgttgggttgtccgaaaaaaaaaaaaaaaaaaaaaaaaa

SEQ ID NO: 1486 - DNA, 59 bp, synthetic construct
  misc_feature 1..59: note = Description of sequence: Primer
  source 1..59: mol_type = other DNA
atggacgacgacgacaagagaagtggtcttagacaaaaaaaaaaaaaaaaaaaaaaaaa

SEQ ID NO: 1487 - DNA, 59 bp, synthetic construct
  misc_feature 1..59: note = Description of sequence: Primer
  source 1..59: mol_type = other DNA
atggacgacgacgacaagtcagaacaagtcatgcaaaaaaaaaaaaaaaaaaaaaaaaa

SEQ ID NO: 1488 - DNA, 59 bp, synthetic construct
  misc_feature 1..59: note = Description of sequence: Primer
  source 1..59: mol_type = other DNA
atggacgacgacgacaagaatccatcggccagtaaaaaaaaaaaaaaaaaaaaaaaaaa

SEQ ID NO: 1489 - DNA, 59 bp, synthetic construct
  misc_feature 1..59: note = Description of sequence: Primer
  source 1..59: mol_type = other DNA
atggacgacgacgacaagtcatcagaagcggaagaaaaaaaaaaaaaaaaaaaaaaaaa

SEQ ID NO: 1490 - DNA, 59 bp, synthetic construct
  misc_feature 1..59: note = Description of sequence: Primer
  source 1..59: mol_type = other DNA
atggacgacgacgacaagcgttaggttggactacaaaaaaaaaaaaaaaaaaaaaaaaa

SEQ ID NO: 1491 - DNA, 59 bp, synthetic construct
  misc_feature 1..59: note = Description of sequence: Primer
  source 1..59: mol_type = other DNA
atggacgacgacgacaaggattagcatcccgaggaaaaaaaaaaaaaaaaaaaaaaaaa

SEQ ID NO: 1492 - DNA, 59 bp, synthetic construct
  misc_feature 1..59: note = Description of sequence: Primer
  source 1..59: mol_type = other DNA
atggacgacgacgacaagtacctgaatagtcacgaaaaaaaaaaaaaaaaaaaaaaaaa

SEQ ID NO: 1493 - DNA, 59 bp, synthetic construct
  misc_feature 1..59: note = Description of sequence: Primer
  source 1..59: mol_type = other DNA
atggacgacgacgacaagagaaccgcatgtcaccaaaaaaaaaaaaaaaaaaaaaaaaa

SEQ ID NO: 1494 - DNA, 59 bp, synthetic construct
  misc_feature 1..59: note = Description of sequence: Primer
  source 1..59: mol_type = other DNA
atggacgacgacgacaagcgattcatatggaccgaaaaaaaaaaaaaaaaaaaaaaaaa

SEQ ID NO: 1495 - DNA, 59 bp, synthetic construct
  misc_feature 1..59: note = Description of sequence: Primer
  source 1..59: mol_type = other DNA
atggacgacgacgacaaggaacgaggcctattgtaaaaaaaaaaaaaaaaaaaaaaaaa

SEQ ID NO: 1496 - DNA, 59 bp, synthetic construct
  misc_feature 1..59: note = Description of sequence: Primer
  source 1..59: mol_type = other DNA
atggacgacgacgacaagtgggagatatgtaaccaaaaaaaaaaaaaaaaaaaaaaaaa

SEQ ID NO: 1497 - DNA, 59 bp, synthetic construct
  misc_feature 1..59: note = Description of sequence: Primer
  source 1..59: mol_type = other DNA
atggacgacgacgacaagttctgaaaacgaagccaaaaaaaaaaaaaaaaaaaaaaaaa

SEQ ID NO: 1498 - DNA, 59 bp, synthetic construct
  misc_feature 1..59: note = Description of sequence: Primer
  source 1..59: mol_type = other DNA
atggacgacgacgacaagagtctctttatgacccaaaaaaaaaaaaaaaaaaaaaaaaa

SEQ ID NO: 1499 - DNA, 59 bp, synthetic construct
  misc_feature 1..59: note = Description of sequence: Primer
  source 1..59: mol_type = other DNA
atggacgacgacgacaaggagctagtaagacgccaaaaaaaaaaaaaaaaaaaaaaaaa

SEQ ID NO: 1500 - DNA, 59 bp, synthetic construct
  misc_feature 1..59: note = Description of sequence: Primer
  source 1..59: mol_type = other DNA
atggacgacgacgacaagaccggtccttcgactaaaaaaaaaaaaaaaaaaaaaaaaaa

SEQ ID NO: 1501 - DNA, 59 bp, synthetic construct
  misc_feature 1..59: note = Description of sequence: Primer
  source 1..59: mol_type = other DNA
atggacgacgacgacaagaaatgacgggcgtcacaaaaaaaaaaaaaaaaaaaaaaaaa

SEQ ID NO: 1502 - DNA, 59 bp, synthetic construct
  misc_feature 1..59: note = Description of sequence: Primer
  source 1..59: mol_type = other DNA
atggacgacgacgacaagtctcggacccaatcctaaaaaaaaaaaaaaaaaaaaaaaaa

SEQ ID NO: 1503 - DNA, 59 bp, synthetic construct
  misc_feature 1..59: note = Description of sequence: Primer
  source 1..59: mol_type = other DNA
atggacgacgacgacaagccatggatcaaaggccaaaaaaaaaaaaaaaaaaaaaaaaa

SEQ ID NO: 1504 - DNA, 59 bp, synthetic construct
  misc_feature 1..59: note = Description of sequence: Primer
  source 1..59: mol_type = other DNA
atggacgacgacgacaagtcggtatgtgaatcccaaaaaaaaaaaaaaaaaaaaaaaaa

SEQ ID NO: 1505 - DNA, 59 bp, synthetic construct
  misc_feature 1..59: note = Description of sequence: Primer
  source 1..59: mol_type = other DNA
atggacgacgacgacaagggttcatgatcgtatcaaaaaaaaaaaaaaaaaaaaaaaaa

SEQ ID NO: 1506 - DNA, 59 bp, synthetic construct
  misc_feature 1..59: note = Description of sequence: Primer
  source 1..59: mol_type = other DNA
atggacgacgacgacaagtaagattctccccttcaaaaaaaaaaaaaaaaaaaaaaaaa

SEQ ID NO: 1507 - DNA, 59 bp, synthetic construct
  misc_feature 1..59: note = Description of sequence: Primer
  source 1..59: mol_type = other DNA
atggacgacgacgacaagaaatctaactgccgtgaaaaaaaaaaaaaaaaaaaaaaaaa

SEQ ID NO: 1508 - DNA, 59 bp, synthetic construct
  misc_feature 1..59: note = Description of sequence: Primer
  source 1..59: mol_type = other DNA
atggacgacgacgacaagtactgatcatttccgcaaaaaaaaaaaaaaaaaaaaaaaaa

SEQ ID NO: 1509 - DNA, 59 bp, synthetic construct
  misc_feature 1..59: note = Description of sequence: Primer
  source 1..59: mol_type = other DNA
atggacgacgacgacaaggtaggatcacggcgttaaaaaaaaaaaaaaaaaaaaaaaaa

SEQ ID NO: 1510 - DNA, 59 bp, synthetic construct
  misc_feature 1..59: note = Description of sequence: Primer
  source 1..59: mol_type = other DNA
atggacgacgacgacaagcttgatgtcgtcaatcaaaaaaaaaaaaaaaaaaaaaaaaa

SEQ ID NO: 1511 - DNA, 59 bp, synthetic construct
  misc_feature 1..59: note = Description of sequence: Primer
  source 1..59: mol_type = other DNA
atggacgacgacgacaagggaagtctagcgagtcaaaaaaaaaaaaaaaaaaaaaaaaa

SEQ ID NO: 1512 - DNA, 59 bp, synthetic construct
  misc_feature 1..59: note = Description of sequence: Primer
  source 1..59: mol_type = other DNA
atggacgacgacgacaagtctctgctcgaggagtaaaaaaaaaaaaaaaaaaaaaaaaa

SEQ ID NO: 1513 - DNA, 59 bp, synthetic construct
  misc_feature 1..59: note = Description of sequence: Primer
  source 1..59: mol_type = other DNA
atggacgacgacgacaagctttgcacgagagccaaaaaaaaaaaaaaaaaaaaaaaaaa

SEQ ID NO: 1514 - DNA, 59 bp, synthetic construct
  misc_feature 1..59: note = Description of sequence: Primer
  source 1..59: mol_type = other DNA
atggacgacgacgacaagactttaccaatggcgaaaaaaaaaaaaaaaaaaaaaaaaaa

SEQ ID NO: 1515 - DNA, 59 bp, synthetic construct
  misc_feature 1..59: note = Description of sequence: Primer
  source 1..59: mol_type = other DNA
atggacgacgacgacaaggcagaatagcgactcgaaaaaaaaaaaaaaaaaaaaaaaaa

SEQ ID NO: 1516 - DNA, 59 bp, synthetic construct
  misc_feature 1..59: note = Description of sequence: Primer
  source 1..59: mol_type = other DNA
atggacgacgacgacaagcgaacgttgcgtttggaaaaaaaaaaaaaaaaaaaaaaaaa

SEQ ID NO: 1517 - DNA, 59 bp, synthetic construct
  misc_feature 1..59: note = Description of sequence: Primer
  source 1..59: mol_type = other DNA
atggacgacgacgacaagtgaagtctcgaagtgaaaaaaaaaaaaaaaaaaaaaaaaaa

SEQ ID NO: 1518 - DNA, 59 bp, synthetic construct
  misc_feature 1..59: note = Description of sequence: Primer
  source 1..59: mol_type = other DNA
atggacgacgacgacaagcccttgggcataaaacaaaaaaaaaaaaaaaaaaaaaaaaa

SEQ ID NO: 1519 - DNA, 59 bp, synthetic construct
  misc_feature 1..59: note = Description of sequence: Primer
  source 1..59: mol_type = other DNA
atggacgacgacgacaagggctagcagttgagtgaaaaaaaaaaaaaaaaaaaaaaaaa

SEQ ID NO: 1520 - DNA, 59 bp, synthetic construct
  misc_feature 1..59: note = Description of sequence: Primer
  source 1..59: mol_type = other DNA
atggacgacgacgacaagatgggctatggtggtaaaaaaaaaaaaaaaaaaaaaaaaaa

SEQ ID NO: 1521 - DNA, 59 bp, synthetic construct
  misc_feature 1..59: note = Description of sequence: Primer
  source 1..59: mol_type = other DNA
atggacgacgacgacaagtaccactaggaatcagaaaaaaaaaaaaaaaaaaaaaaaaa

SEQ ID NO: 1522 - DNA, 59 bp, synthetic construct
  misc_feature 1..59: note = Description of sequence: Primer
  source 1..59: mol_type = other DNA
atggacgacgacgacaagacataggggcattgagaaaaaaaaaaaaaaaaaaaaaaaaa

SEQ ID NO: 1523 - DNA, 59 bp, synthetic construct
  misc_feature 1..59: note = Description of sequence: Primer
  source 1..59: mol_type = other DNA
atggacgacgacgacaaggttcatagatagcgcaaaaaaaaaaaaaaaaaaaaaaaaaa

SEQ ID NO: 1524 - DNA, 59 bp, synthetic construct
  misc_feature 1..59: note = Description of sequence: Primer
  source 1..59: mol_type = other DNA
atggacgacgacgacaagtggctttcctaacagcaaaaaaaaaaaaaaaaaaaaaaaaa

SEQ ID NO: 1525 - DNA, 59 bp, synthetic construct
  misc_feature 1..59: note = Description of sequence: Primer
  source 1..59: mol_type = other DNA
atggacgacgacgacaaggaagcgtccatatgacaaaaaaaaaaaaaaaaaaaaaaaaa

SEQ ID NO: 1526 - DNA, 59 bp, synthetic construct
  misc_feature 1..59: note = Description of sequence: Primer
  source 1..59: mol_type = other DNA
atggacgacgacgacaagcacaagcgactctttcaaaaaaaaaaaaaaaaaaaaaaaaa

SEQ ID NO: 1527 - DNA, 59 bp, synthetic construct
  misc_feature 1..59: note = Description of sequence: Primer
  source 1..59: mol_type = other DNA
atggacgacgacgacaagaagatattccgcgtgcaaaaaaaaaaaaaaaaaaaaaaaaa

SEQ ID NO: 1528 - DNA, 59 bp, synthetic construct
  misc_feature 1..59: note = Description of sequence: Primer
  source 1..59: mol_type = other DNA
atggacgacgacgacaaggtccaaatcacaccgtaaaaaaaaaaaaaaaaaaaaaaaaa

SEQ ID NO: 1529 - DNA, 59 bp, synthetic construct
  misc_feature 1..59: note = Description of sequence: Primer
  source 1..59: mol_type = other DNA
atggacgacgacgacaaggacgtcatcgtacctgaaaaaaaaaaaaaaaaaaaaaaaaa

SEQ ID NO: 1530 - DNA, 59 bp, synthetic construct
  misc_feature 1..59: note = Description of sequence: Primer
  source 1..59: mol_type = other DNA
atggacgacgacgacaagacagctgctgtgcatcaaaaaaaaaaaaaaaaaaaaaaaaa

SEQ ID NO: 1531 - DNA, 59 bp, synthetic construct
  misc_feature 1..59: note = Description of sequence: Primer
  source 1..59: mol_type = other DNA
atggacgacgacgacaagttgtaacagtgcaacgaaaaaaaaaaaaaaaaaaaaaaaaa

SEQ ID NO: 1532 - DNA, 59 bp, synthetic construct
  misc_feature 1..59: note = Description of sequence: Primer
  source 1..59: mol_type = other DNA
atggacgacgacgacaagagctgttatgcgccgtaaaaaaaaaaaaaaaaaaaaaaaaa

SEQ ID NO: 1533 - DNA, 59 bp, synthetic construct
  misc_feature 1..59: note = Description of sequence: Primer
  source 1..59: mol_type = other DNA
atggacgacgacgacaagttgcccaaaaccctgtaaaaaaaaaaaaaaaaaaaaaaaaa

SEQ ID NO: 1534 - DNA, 59 bp, synthetic construct
  misc_feature 1..59: note = Description of sequence: Primer
  source 1..59: mol_type = other DNA
atggacgacgacgacaagagctaagtcgctggtaaaaaaaaaaaaaaaaaaaaaaaaaa

SEQ ID NO: 1535 - DNA, 59 bp, synthetic construct
  misc_feature 1..59: note = Description of sequence: Primer
  source 1..59: mol_type = other DNA
atggacgacgacgacaagtcctgtaattacgcctaaaaaaaaaaaaaaaaaaaaaaaaa

SEQ ID NO: 1536 - DNA, 59 bp, synthetic construct
  misc_feature 1..59: note = Description of sequence: Primer
  source 1..59: mol_type = other DNA
atggacgacgacgacaagcgcctgatcctttgagaaaaaaaaaaaaaaaaaaaaaaaaa

SEQ ID NO: 1537 - DNA, 59 bp, synthetic construct
  misc_feature 1..59: note = Description of sequence: Primer
  source 1..59: mol_type = other DNA
atggacgacgacgacaagacctctgtcgagttacaaaaaaaaaaaaaaaaaaaaaaaaa

SEQ ID NO: 1538 - DNA, 59 bp, synthetic construct
  misc_feature 1..59: note = Description of sequence: Primer
  source 1..59: mol_type = other DNA
atggacgacgacgacaaggacgttgtagcaggataaaaaaaaaaaaaaaaaaaaaaaaa

SEQ ID NO: 1539 - DNA, 59 bp, synthetic construct
  misc_feature 1..59: note = Description of sequence: Primer
  source 1..59: mol_type = other DNA
atggacgacgacgacaagatggctcaacgaggagaaaaaaaaaaaaaaaaaaaaaaaaa

SEQ ID NO: 1540 - DNA, 59 bp, synthetic construct
  misc_feature 1..59: note = Description of sequence: Primer
  source 1..59: mol_type = other DNA
atggacgacgacgacaagagaggtacatgagaggaaaaaaaaaaaaaaaaaaaaaaaaa

SEQ ID NO: 1541 - DNA, 59 bp, synthetic construct
  misc_feature 1..59: note = Description of sequence: Primer
  source 1..59: mol_type = other DNA
atggacgacgacgacaagtgacagcccatctcgtaaaaaaaaaaaaaaaaaaaaaaaaa

SEQ ID NO: 1542 - DNA, 59 bp, synthetic construct
  misc_feature 1..59: note = Description of sequence: Primer
  source 1..59: mol_type = other DNA
atggacgacgacgacaagtgacaacgccatgtctaaaaaaaaaaaaaaaaaaaaaaaaa

SEQ ID NO: 1543 - DNA, 59 bp, synthetic construct
  misc_feature 1..59: note = Description of sequence: Primer
  source 1..59: mol_type = other DNA
atggacgacgacgacaaggggttacaacgtatagaaaaaaaaaaaaaaaaaaaaaaaaa

SEQ ID NO: 1544 - DNA, 59 bp, synthetic construct
  misc_feature 1..59: note = Description of sequence: Primer
  source 1..59: mol_type = other DNA
atggacgacgacgacaagcatacgatcacggacgaaaaaaaaaaaaaaaaaaaaaaaaa

SEQ ID NO: 1545 - DNA, 59 bp, synthetic construct
  misc_feature 1..59: note = Description of sequence: Primer
  source 1..59: mol_type = other DNA
atggacgacgacgacaagtaccccggctatcaacaaaaaaaaaaaaaaaaaaaaaaaaa

SEQ ID NO: 1546 - DNA, 59 bp, synthetic construct
  misc_feature 1..59: note = Description of sequence: Primer
  source 1..59: mol_type = other DNA
atggacgacgacgacaagatgaaactcaccgcaaaaaaaaaaaaaaaaaaaaaaaaaaa

SEQ ID NO: 1547 - DNA, 59 bp, synthetic construct
  misc_feature 1..59: note = Description of sequence: Primer
  source 1..59: mol_type = other DNA
atggacgacgacgacaagcctatatccattcctgaaaaaaaaaaaaaaaaaaaaaaaaa

SEQ ID NO: 1548 - DNA, 59 bp, synthetic construct
  misc_feature 1..59: note = Description of sequence: Primer
  source 1..59: mol_type = other DNA
atggacgacgacgacaagtagcattaacagcgtgaaaaaaaaaaaaaaaaaaaaaaaaa

SEQ ID NO: 1549 - protein, 11 aa, synthetic construct
  REGION 1..11: note = Description of sequence: CRD3 from table 3
CGGQAGTALIF

SEQ ID NO: 1550 - protein, 11 aa, synthetic construct
  REGION 1..11: note = Description of sequence: CRD3 from table 3
CAVNGGNQFYF

SEQ ID NO: 1551 - protein, 11 aa, synthetic construct
  REGION 1..11: note = Description of sequence: CRD3 from table 3
CAVGRDDKIIF

SEQ ID NO: 1552 - protein, 13 aa, synthetic construct
  REGION 1..13: note = Description of sequence: CRD3 from table 3
CATCMDSNYQLIW

SEQ ID NO: 1553 - protein, 13 aa, synthetic construct
  REGION 1..13: note = Description of sequence: CRD3 from table 3
CAVTTDSWGKLQF

SEQ ID NO: 1554 - protein, 13 aa, synthetic construct
  REGION 1..13: note = Description of sequence: CRD3 from table 3
CAVNPGGADGLTF

SEQ ID NO: 1555 - protein, 12 aa, synthetic construct
  REGION 1..12: note = Description of sequence: CRD3 from table 3
CAVSGSARQLTF

SEQ ID NO: 1556 - protein, 15 aa, synthetic construct
  REGION 1..15: note = Description of sequence: CRD3 from table 3
CAVNPRDNYGQNFVF

SEQ ID NO: 1557 - protein, 11 aa, synthetic construct
  REGION 1..11: note = Description of sequence: CRD3 from table 3
CAAGGSYIPTF

SEQ ID NO: 1558 - protein, 12 aa, synthetic construct
  REGION 1..12: note = Description of sequence: CRD3 from table 3
CAVNTGFQKLVF

SEQ ID NO: 1559 - protein, 11 aa, synthetic construct
  REGION 1..11: note = Description of sequence: CRD3 from table 3
CAVNGNNRLAF

SEQ ID NO: 1560 - protein, 14 aa, synthetic construct
  REGION 1..14: note = Description of sequence: CRD3 from table 3
CAVQGGGSQGNLIF

SEQ ID NO: 1561 - protein, 12 aa, synthetic construct
  REGION 1..12: note = Description of sequence: CRD3 from table 3
CAAGGSQGNLIF

SEQ ID NO: 1562 - protein, 8 aa, synthetic construct
  REGION 1..8: note = Description of sequence: CRD3 from table 3
CAVNIPTF

SEQ ID NO: 1563 - protein, 12 aa, synthetic construct
  REGION 1..12: note = Description of sequence: CRD3 from table 3
CAVSGTASKLTF

SEQ ID NO: 1564 - protein, 14 aa, synthetic construct
  REGION 1..14: note = Description of sequence: CRD3 from table 3
CAEKGGGGADGLTF

SEQ ID NO: 1565 - protein, 14 aa, synthetic construct
  REGION 1..14: note = Description of sequence: CRD3 from table 3
CAASKEAAGNKLTF

SEQ ID NO: 1566 - protein, 14 aa, synthetic construct
  REGION 1..14: note = Description of sequence: CRD3 from table 3
CIVRGFAYGQNFVF

SEQ ID NO: 1567 - protein, 11 aa, synthetic construct
  REGION 1..11: note = Description of sequence: CRD3 from table 3
CAVSDGQKLLF

SEQ ID NO: 1568 - protein, 13 aa, synthetic construct
  REGION 1..13: note = Description of sequence: CRD3 from table 3
CAVTRGGADGLTF

SEQ ID NO: 1569 - protein, 13 aa, synthetic construct
  REGION 1..13: note = Description of sequence: CRD3 from table 3
CAENRDGDDKIIF

SEQ ID NO: 1570 - protein, 13 aa, synthetic construct
  REGION 1..13: note = Description of sequence: CRD3 from table 3
CAASGGGADGLTF

SEQ ID NO: 1571 - protein, 9 aa, synthetic construct
  REGION 1..9: note = Description of sequence: CRD3 from table 3
CAVRTQIIF

SEQ ID NO: 1572 - protein, 17 aa, synthetic construct
  REGION 1..17: note = Description of sequence: CRD3 from table 3
CAVRSERSGGGADGLTF

SEQ ID NO: 1573 - protein, 10 aa, synthetic construct
  REGION 1..10: note = Description of sequence: CRD3 from table 3
CAVNDYKLSF

SEQ ID NO: 1574 - protein, 7 aa, synthetic construct
  REGION 1..7: note = Description of sequence: CRD3 from table 3
CAAEFYF

SEQ ID NO: 1575 - protein, 11 aa, synthetic construct
  REGION 1..11: note = Description of sequence: CRD3 from table 3
CASDNNARLMF

SEQ ID NO: 1576 - protein, 14 aa, synthetic construct
  REGION 1..14: note = Description of sequence: CRD3 from table 3
CAVIRSGGYNKLIF

SEQ ID NO: 1577 - protein, 13 aa, synthetic construct
  REGION 1..13: note = Description of sequence: CRD3 from table 3
CAGFSGGYNKLIF

SEQ ID NO: 1578 - protein, 13 aa, synthetic construct
  REGION 1..13: note = Description of sequence: CRD3 from table 3
CTSRVSDGQKLLF

SEQ ID NO: 1579 - protein, 10 aa, synthetic construct
  REGION 1..10: note = Description of sequence: CRD3 from table 3
CVVNNDKIIF

SEQ ID NO: 1580 - protein, 14 aa, synthetic construct
  REGION 1..14: note = Description of sequence: CRD3 from table 3
CVVNEYSSASKIIF

SEQ ID NO: 1581 - protein, 10 aa, synthetic construct
  REGION 1..10: note = Description of sequence: CRD3 from table 3
CVVAEARLMF

SEQ ID NO: 1582 - protein, 13 aa, synthetic construct
  REGION 1..13: note = Description of sequence: CRD3 from table 3
CAVNGANDYKLSF

SEQ ID NO: 1583 - protein, 11 aa, synthetic construct
  REGION 1..11: note = Description of sequence: CRD3 from table 3
CAYSMLDRLMF

SEQ ID NO: 1584 - protein, 13 aa, synthetic construct
  REGION 1..13: note = Description of sequence: CRD3 from table 3
CAVGSDSSYKLIF

SEQ ID NO: 1585 - protein, 14 aa, synthetic construct
  REGION 1..14: note = Description of sequence: CRD3 from table 3
CAVGIYNQGGKLIF

SEQ ID NO: 1586 - protein, 11 aa, synthetic construct
  REGION 1..11: note = Description of sequence: CRD3 from table 3
CAVRRDDKIIF

SEQ ID NO: 1587 - protein, 13 aa, synthetic construct
  REGION 1..13: note = Description of sequence: CRD3 from table 3
CAVNEGTGNQFYF

SEQ ID NO: 1588 - protein, 13 aa, synthetic construct
  REGION 1..13: note = Description of sequence: CRD3 from table 3
CAVKGGGADGLTF

SEQ ID NO: 1589 - protein, 12 aa, synthetic construct
  REGION 1..12: note = Description of sequence: CRD3 from table 3
CAEGGGADGLTF

SEQ ID NO: 1590 - protein, 14 aa, synthetic construct
  REGION 1..14: note = Description of sequence: CRD3 from table 3
CVVNMGKNGQKLLF

SEQ ID NO: 1591 - protein, 15 aa, synthetic construct
  REGION 1..15: note = Description of sequence: CRD3 from table 3
CAALISNFGNEKLTF

SEQ ID NO: 1592 - protein, 12 aa, synthetic construct
  REGION 1..12: note = Description of sequence: CRD3 from table 3
CAGGGSQGNLIF

SEQ ID NO: 1593 - protein, 13 aa, synthetic construct
  REGION 1..13: note = Description of sequence: CRD3 from table 3
CASLGQGAQKLVF

SEQ ID NO: 1594 - protein, 12 aa, synthetic construct
  REGION 1..12: note = Description of sequence: CRD3 from table 3
CAVNQAGTALIF

SEQ ID NO: 1595 - protein, 12 aa, synthetic construct
  REGION 1..12: note = Description of sequence: CRD3 from table 3
CAEYSSASKIIF

SEQ ID NO: 1596 - protein, 14 aa, synthetic construct
  REGION 1..14: note = Description of sequence: CRD3 from table 3
CAVNRDSGTYKYIF

SEQ ID NO: 1597 - protein, 14 aa, synthetic construct
  REGION 1..14: note = Description of sequence: CRD3 from table 3
CASISLDSNYQLIW

SEQ ID NO: 1598 - protein, 14 aa, synthetic construct
  REGION 1..14: note = Description of sequence: CRD3 from table 3
CAVGREAAGNKLTF

SEQ ID NO: 1599 - protein, 16 aa, synthetic construct
  REGION 1..16: note = Description of sequence: CRD3 from table 3
CALSRPSRGSQGNLIF

SEQ ID NO: 1600 - protein, 15 aa, synthetic construct
  REGION 1..15: note = Description of sequence: CRD3 from table 3
CIVAAISGSARQLTF

SEQ ID NO: 1601 - protein, 13 aa, synthetic construct
  REGION 1..13: note = Description of sequence: CRD3 from table 3
CAVSGGGADGLTF

SEQ ID NO: 1602 - protein, 14 aa, synthetic construct
  REGION 1..14: note = Description of sequence: CRD3 from table 3
CAVNVQGGSEKLVF

SEQ ID NO: 1603 - protein, 12 aa, synthetic construct
  REGION 1..12: note = Description of sequence: CRD3 from table 3
CAVNKGFQKLVF

SEQ ID NO: 1604 - protein, 15 aa, synthetic construct
  REGION 1..15: note = Description of sequence: CRD3 from table 3
CATDGRGSTLGRLYF

SEQ ID NO: 1605 - protein, 13 aa, synthetic construct
  REGION 1..13: note = Description of sequence: CRD3 from table 3
CAMSESDGQKLLF

SEQ ID NO: 1606 - protein, 13 aa, synthetic construct
  REGION 1..13: note = Description of sequence: CRD3 from table 3
CAPPGDGNNRLAF

SEQ ID NO: 1607 - protein, 14 aa, synthetic construct
  REGION 1..14: note = Description of sequence: CRD3 from table 3
CAGAGGGSQGNLIF

SEQ ID NO: 1608 - protein, 12 aa, synthetic construct
  REGION 1..12: note = Description of sequence: CRD3 from table 3
CAVNSDGQKLLF

SEQ ID NO: 1609 - protein, 14 aa, synthetic construct
  REGION 1..14: note = Description of sequence: CRD3 from table 3
CAVRDMGSNYQLIW

SEQ ID NO: 1610 - protein, 12 aa, synthetic construct
  REGION 1..12: note = Description of sequence: CRD3 from table 3
CAASASTDKLIF

SEQ ID NO: 1611 - protein, 18 aa, synthetic construct
  REGION 1..18: note = Description of sequence: CRD3 from table 3
CAGASTGGDSGNTGKLIF

SEQ ID NO: 1612 - protein, 15 aa, synthetic construct
  REGION 1..15: note = Description of sequence: CRD3 from table 3
CAMSLSNFGNEKLTF

SEQ ID NO: 1613 - protein, 13 aa, synthetic construct
  REGION 1..13: note = Description of sequence: CRD3 from table 3
CAVILQGAQKLVF

SEQ ID NO: 1614 - protein, 11 aa, synthetic construct
  REGION 1..11: note = Description of sequence: CRD3 from table 3
CADYYGQNFVF

SEQ ID NO: 1615 - protein, 13 aa, synthetic construct
  REGION 1..13: note = Description of sequence: CRD3 from table 3
CAGQTGNTGKLIF

SEQ ID NO: 1616 - protein, 14 aa, synthetic construct
  REGION 1..14: note = Description of sequence: CRD3 from table 3
CAGPMKTSYDKVIF

SEQ ID NO: 1617 - protein, 11 aa, synthetic construct
  REGION 1..11: note = Description of sequence: CRD3 from table 3
CARNTGNQFYF

SEQ ID NO: 1618 - protein, 13 aa, synthetic construct
  REGION 1..13: note = Description of sequence: CRD3 from table 3
CGTLRNNNARLMF

SEQ ID NO: 1619 - protein, 15 aa, synthetic construct
  REGION 1..15: note = Description of sequence: CRD3 from table 3
CAGDKGGGSQGNLIF

SEQ ID NO: 1620 - protein, 15 aa, synthetic construct
  REGION 1..15: note = Description of sequence: CRD3 from table 3
CAVTGGGTSYGKLTF

SEQ ID NO: 1621 - protein, 15 aa, synthetic construct
  REGION 1..15: note = Description of sequence: CRD3 from table 3
CAVTAGGTSYGKLTF

SEQ ID NO: 1622 - protein, 13 aa, synthetic construct
  REGION 1..13: note = Description of sequence: CRD3 from table 3
CAVYSGGYNKLIF

SEQ ID NO: 1623 - protein, 12 aa, synthetic construct
  REGION 1..12: note = Description of sequence: CRD3 from table 3
CALPSGNTPLVF

SEQ ID NO: 1624 - protein, 14 aa, synthetic construct
  REGION 1..14: note = Description of sequence: CRD3 from table 3
CAYRSPPSSEKLVF

SEQ ID NO: 1625 - protein, 11 aa, synthetic construct
  REGION 1..11: note = Description of sequence: CRD3 from table 3
CAVKDGQNFVF

SEQ ID NO: 1626 - protein, 14 aa, synthetic construct
  REGION 1..14: note = Description of sequence: CRD3 from table 3
CALSPGYNFNKFYF

SEQ ID NO: 1627 - protein, 16 aa, synthetic construct
  REGION 1..16: note = Description of sequence: CRD3 from table 3
CAVSSITQGGSEKLVF

SEQ ID NO: 1628 - protein, 12 aa, synthetic construct
  REGION 1..12: note = Description of sequence: CRD3 from table 3
CASSYSENEQFF

SEQ ID NO: 1629 - protein, 15 aa, synthetic construct
  REGION 1..15: note = Description of sequence: CRD3 from table 3
CASRSYVASSNEQFF

SEQ ID NO: 1630 - protein, 15 aa, synthetic construct
  REGION 1..15: note = Description of sequence: CRD3 from table 3
CASTQWYGGGTPPYF

SEQ ID NO: 1631 - protein, 16 aa, synthetic construct
  REGION 1..16: note = Description of sequence: CRD3 from table 3
CASSLTTGVFSQPQHF

SEQ ID NO: 1632 - protein, 17 aa, synthetic construct
  REGION 1..17: note = Description of sequence: CRD3 from table 3
CATSPYSVTTFANTIYF

SEQ ID NO: 1633 - protein, 11 aa, synthetic construct
  REGION 1..11: note = Description of sequence: CRD3 from table 3
CAGMTVTEAFF

SEQ ID NO: 1634 - protein, 17 aa, synthetic construct
  REGION 1..17: note = Description of sequence: CRD3 from table 3
CASSQALLAPSTDTQYF

SEQ ID NO: 1635 - protein, 13 aa, synthetic construct
  REGION 1..13: note = Description of sequence: CRD3 from table 3
CASSEGGIGELFF

SEQ ID NO: 1636 - protein, 13 aa, synthetic construct
  REGION 1..13: note = Description of sequence: CRD3 from table 3
CASSQDTDGRMFF

SEQ ID NO: 1637 - protein, 16 aa, synthetic construct
  REGION 1..16: note = Description of sequence: CRD3 from table 3
CASSEAPGTSVGGLFF

SEQ ID NO: 1638 - protein, 13 aa, synthetic construct
  REGION 1..13: note = Description of sequence: CRD3 from table 3
CASTTGDGLGAFF

SEQ ID NO: 1639 - protein, 14 aa, synthetic construct
  REGION 1..14: note = Description of sequence: CRD3 from table 3
CASSQDIGNFEQFF

SEQ ID NO: 1640 - protein, 17 aa, synthetic construct
  REGION 1..17: note = Description of sequence: CRD3 from table 3
CASSGTGGYSGANVLTF

SEQ ID NO: 1641 - protein, 12 aa, synthetic construct
  REGION 1..12: note = Description of sequence: CRD3 from table 3
CASSEANEKLFF

SEQ ID NO: 1642 - protein, 15 aa, synthetic construct
  REGION 1..15: note = Description of sequence: CRD3 from table 3
CASSQAPLASGGYTF

SEQ ID NO: 1643 - protein, 16 aa, synthetic construct
  REGION 1..16: note = Description of sequence: CRD3 from table 3
CASSLAGQVFSGELFF

SEQ ID NO: 1644 - protein, 15 aa, synthetic construct
  REGION 1..15: note = Description of sequence: CRD3 from table 3
CASSQGTINTGELFF

SEQ ID NO: 1645 - protein, 12 aa, synthetic construct
  REGION 1..12: note = Description of sequence: CRD3 from table 3
CSARDGTSSGYF

SEQ ID NO: 1646 - protein, 15 aa, synthetic construct
  REGION 1..15: note = Description of sequence: CRD3 from table 3
CASMPRGFPSDEQFF

SEQ ID NO: 1647 - protein, 13 aa, synthetic construct
  REGION 1..13: note = Description of sequence: CRD3 from table 3
CASSQDWVAEQYF

SEQ ID NO: 1648 - protein, 13 aa, synthetic construct
  REGION 1..13: note = Description of sequence: CRD3 from table 3
CASSYGTGDGYTF

SEQ ID NO: 1649 - protein, 13 aa, synthetic construct
  REGION 1..13: note = Description of sequence: CRD3 from table 3
CASSLGLGQPQHF

SEQ ID NO: 1650 - protein, 16 aa, synthetic construct
  REGION 1..16: note = Description of sequence: CRD3 from table 3
CASSSRDRSSSTEAFF

SEQ ID NO: 1651 - protein, 14 aa, synthetic construct
  REGION 1..14: note = Description of sequence: CRD3 from table 3
CASSQAGVGGELFF

SEQ ID NO: 1652 - protein, 15 aa, synthetic construct
  REGION 1..15: note = Description of sequence: CRD3 from table 3
CASSLPGLASHEQFF

SEQ ID NO: 1653 - protein, 14 aa, synthetic construct
  REGION 1..14: note = Description of sequence: CRD3 from table 3
CASSYSGLGQPQHF

SEQ ID NO: 1654 - protein, 13 aa, synthetic construct
  REGION 1..13: note = Description of sequence: CRD3 from table 3
CASSSTVYNEQFF

SEQ ID NO: 1655 - protein, 15 aa, synthetic construct
  REGION 1..15: note = Description of sequence: CRD3 from table 3
CASSRSPGGVYEQYF

SEQ ID NO: 1656 - protein, 15 aa, synthetic construct
  REGION 1..15: note = Description of sequence: CRD3 from table 3
CASSPSPAGAYEQYF

SEQ ID NO: 1657 - protein, 14 aa, synthetic construct
  REGION 1..14: note = Description of sequence: CRD3 from table 3
CASSWTGANYGYTF

SEQ ID NO: 1658 - protein, 14 aa, synthetic construct
  REGION 1..14: note = Description of sequence: CRD3 from table 3
CASSPNLAGEEQYF

SEQ ID NO: 1659 - protein, 13 aa, synthetic construct
  REGION 1..13: note = Description of sequence: CRD3 from table 3
CASSLGQGQPQHF

SEQ ID NO: 1660 - protein, 15 aa, synthetic construct
  REGION 1..15: note = Description of sequence: CRD3 from table 3
CASSQEVVANNEQFF

SEQ ID NO: 1661 - protein, 14 aa, synthetic construct
  REGION 1..14: note = Description of sequence: CRD3 from table 3
CASSLGGNTGELFF

SEQ ID NO: 1662 - protein, 14 aa, synthetic construct
  REGION 1..14: note = Description of sequence: CRD3 from table 3
CASSLELAGGPAFF

SEQ ID NO: 1663 - protein, 14 aa, synthetic construct
  REGION 1..14: note = Description of sequence: CRD3 from table 3
CASRAGIQSGELFF

SEQ ID NO: 1664 - protein, 13 aa, synthetic construct
  REGION 1..13: note = Description of sequence: CRD3 from table 3
CASSPSGHYEQYF

SEQ ID NO: 1665 - protein, 14 aa, synthetic construct
  REGION 1..14: note = Description of sequence: CRD3 from table 3
CASSRGTGGYEQFF

SEQ ID NO: 1666 - protein, 12 aa, synthetic construct
  REGION 1..12: note = Description of sequence: CRD3 from table 3
CASSLSGDEQYF

SEQ ID NO: 1667 - protein, 16 aa, synthetic construct
  REGION 1..16: note = Description of sequence: CRD3 from table 3
CASSLTPSASGYEQYF

SEQ ID NO: 1668 - protein, 12 aa, synthetic construct
  REGION 1..12: note = Description of sequence: CRD3 from table 3
CASSQGWDEQYF

SEQ ID NO: 1669 - protein, 15 aa, synthetic construct
  REGION 1..15: note = Description of sequence: CRD3 from table 3
CASSTLSGNYNEQFF

SEQ ID NO: 1670 - protein, 11 aa, synthetic construct
  REGION 1..11: note = Description of sequence: CRD3 from table 3
CASGSVPEQYF

SEQ ID NO: 1671 - protein, 15 aa, synthetic construct
  REGION 1..15: note = Description of sequence: CRD3 from table 3
CASSPGTGGTYEQYF

SEQ ID NO: 1672 - protein, 17 aa, synthetic construct
  REGION 1..17: note = Description of sequence: CRD3 from table 3
CASSGLAGFSPQETQYF

SEQ ID NO: 1673 - protein, 14 aa, synthetic construct
  REGION 1..14: note = Description of sequence: CRD3 from table 3
CASSGGTGAYEQYF

SEQ ID NO: 1674 - protein, 13 aa, synthetic construct
  REGION 1..13: note = Description of sequence: CRD3 from table 3
CASSAGASIEQYF

SEQ ID NO: 1675 - protein, 16 aa, synthetic construct
  REGION 1..16: note = Description of sequence: CRD3 from table 3
CASSLGQGGVGEKLFF

SEQ ID NO: 1676 - protein, 13 aa, synthetic construct
  REGION 1..13: note = Description of sequence: CRD3 from table 3
CATRKSYNSPLHF

SEQ ID NO: 1677 - protein, 14 aa, synthetic construct
  REGION 1..14: note = Description of sequence: CRD3 from table 3
CASSQAQGTYEQYF

SEQ ID NO: 1678 - protein, 13 aa, synthetic construct
  REGION 1..13: note = Description of sequence: CRD3 from table 3
CASSLGWGYEQYF

SEQ ID NO: 1679 - protein, 13 aa, synthetic construct
  REGION 1..13: note = Description of sequence: CRD3 from table 3
CASSPGLDYEQYF

SEQ ID NO: 1680 - protein, 13 aa, synthetic construct
  REGION 1..13: note = Description of sequence: CRD3 from table 3
CASTRQFNQPQHF

SEQ ID NO: 1681 - protein, 13 aa, synthetic construct
  REGION 1..13: note = Description of sequence: CRD3 from table 3
CASSQGGGTEAFF

SEQ ID NO: 1682 - protein, 13 aa, synthetic construct
  REGION 1..13: note = Description of sequence: CRD3 from table 3
CSALTGSSYEQYF

SEQ ID NO: 1683 - protein, 11 aa, synthetic construct
  REGION 1..11: note = Description of sequence: CRD3 from table 3
CASSGGYEQYF

SEQ ID NO: 1684 - protein, 13 aa, synthetic construct
  REGION 1..13: note = Description of sequence: CRD3 from table 3
CASSFGDSYEQYF

SEQ ID NO: 1685 - protein, 14 aa, synthetic construct
  REGION 1..14: note = Description of sequence: CRD3 from table 3
CASSLSGSSYEQYF

SEQ ID NO: 1686 - protein, 15 aa, synthetic construct
  REGION 1..15: note = Description of sequence: CRD3 from table 3
CAISEASGVTYEQYF

SEQ ID NO: 1687 - protein, 13 aa, synthetic construct
  REGION 1..13: note = Description of sequence: CRD3 from table 3
CASSQGQGYEQYF

SEQ ID NO: 1688 - protein, 14 aa, synthetic construct
  REGION 1..14: note = Description of sequence: CRD3 from table 3
CASSGSRVPYEQYF

SEQ ID NO: 1689 - protein, 15 aa, synthetic construct
  REGION 1..15: note = Description of sequence: CRD3 from table 3
CASSQTGTGAYEQYF

SEQ ID NO: 1690 - protein, 11 aa, synthetic construct
  REGION 1..11: note = Description of sequence: CRD3 from table 3
CSANRQGSIYF

SEQ ID NO: 1691 - protein, 13 aa, synthetic construct
  REGION 1..13: note = Description of sequence: CRD3 from table 3
CASSFEWSYEQYF

SEQ ID NO: 1692 - protein, 12 aa, synthetic construct
  REGION 1..12: note = Description of sequence: CRD3 from table 3
CASSHRGYEQYF

SEQ ID NO: 1693 - protein, 17 aa, synthetic construct
  REGION 1..17: note = Description of sequence: CRD3 from table 3
CASSPIDRAGGPYEQYF

SEQ ID NO: 1694 - protein, 16 aa, synthetic construct
  REGION 1..16: note = Description of sequence: CRD3 from table 3
CASSLTSGSFAGELFF

SEQ ID NO: 1695 - protein, 14 aa, synthetic construct
  REGION 1..14: note = Description of sequence: CRD3 from table 3
CASSPQGSGGEAFF

SEQ ID NO: 1696 - protein, 13 aa, synthetic construct
  REGION 1..13: note = Description of sequence: CRD3 from table 3
CASSYGGGYEQYF

SEQ ID NO: 1697 - protein, 13 aa, synthetic construct
  REGION 1..13: note = Description of sequence: CRD3 from table 3
CASSALGINEQFF

SEQ ID NO: 1698 - protein, 14 aa, synthetic construct
  REGION 1..14: note = Description of sequence: CRD3 from table 3
CASSWTGGGQPQHF

SEQ ID NO: 1699 - protein, 13 aa, synthetic construct
  REGION 1..13: note = Description of sequence: CRD3 from table 3
CASNQGPGNTIYF

SEQ ID NO: 1700 - protein, 11 aa, synthetic construct
  REGION 1..11: note = Description of sequence: CRD3 from table 3
CASSDSYEQYF

SEQ ID NO: 1701 - protein, 14 aa, synthetic construct
  REGION 1..14: note = Description of sequence: CRD3 from table 3
CASSLVPLSPEQYF

SEQ ID NO: 1702 - protein, 15 aa, synthetic construct
  REGION 1..15: note = Description of sequence: CRD3 from table 3
CASSLGAGGGGTQYF

SEQ ID NO: 1703 - protein, 16 aa, synthetic construct
  REGION 1..16: note = Description of sequence: CRD3 from table 3
CASSQQGVWGTGELFF

SEQ ID NO: 1704 - protein, 13 aa, synthetic construct
  REGION 1..13: note = Description of sequence: CRD3 from table 3
CASSPRSTDTQYF

SEQ ID NO: 1705 - protein, 13 aa, synthetic construct
  REGION 1..13: note = Description of sequence: CRD3 from table 3
CASSFQGYTEAFF

SEQ ID NO: 1706 - protein, 14 aa, synthetic construct
  REGION 1..14: note = Description of sequence: CRD3 from table 3
CASSYAQGAETQYF

SEQ ID NO: 1707 - protein, 16 aa, synthetic construct
  REGION 1..16: note = Description of sequence: CRD3 from table 3
CASSLGLADPNNEQFF

SEQ ID NO: 1708 - protein, 20 aa, synthetic construct
  REGION 1..20: note = Description of sequence: CRD3 from table 3
CSARDGGLAGEQKVGDTQYF

SEQ ID NO: 1709 - protein, 14 aa, synthetic construct
  REGION 1..14: note = Description of sequence: CRD3 from table 3
CSARGAGVPYEQYF

SEQ ID NO: 1710 - protein, 16 aa, synthetic construct
  REGION 1..16: note = Description of sequence: CRD3 from table 3
CASSVGVSGSFYEQYF

SEQ ID NO: 1711 - protein, 12 aa, synthetic construct
  REGION 1..12: note = Description of sequence: CRD3 from table 3
CASWDRGNEQFF

SEQ ID NO: 1712 - protein, 12 aa, synthetic construct
  REGION 1..12: note = Description of sequence: CRD3 from table 3
CASSSANYGYTF

SEQ ID NO: 1713 - protein, 15 aa, synthetic construct
  REGION 1..15: note = Description of sequence: CRD3 from table 3
CASSQFRGGRDGYTF

SEQ ID NO: 1714 - protein, 15 aa, synthetic construct
  REGION 1..15: note = Description of sequence: CRD3 from table 3
CASSYSTGTAYGYTF

SEQ ID NO: 1715 - protein, 13 aa, synthetic construct
  REGION 1..13: note = Description of sequence: CRD3 from table 3
CASSIRSSYEQYF

SEQ ID NO: 1716 - protein, 14 aa, synthetic construct
  REGION 1..14: note = Description of sequence: CRD3 from table 3
CASSARDFAYEQYF

SEQ ID NO: 1717 - protein, 13 aa, synthetic construct
  REGION 1..13: note = Description of sequence: CRD3 from table 3
CASSFALSNEAFF

SEQ ID NO: 1718 - protein, 9 aa, synthetic construct
  REGION 1..9: note = Description of sequence: CRD3 from table 3
CASDEKLFF

SEQ ID NO: 1719 - protein, 13 aa, synthetic construct
  REGION 1..13: note = Description of sequence: CRD3 from table 3
CASSFAGTTEAFF

SEQ ID NO: 1720 - protein, 14 aa, synthetic construct
  REGION 1..14: note = Description of sequence: CRD3 from table 3
CSVTGTGLFDEQYF

SEQ ID NO: 1721 - protein, 13 aa, synthetic construct
  REGION 1..13: note = Description of sequence: CRD3 from table 3
CASSFVNTGELFF

SEQ ID NO: 1722 - protein, 15 aa, synthetic construct
  REGION 1..15: note = Description of sequence: CRD3 from table 3
CASSDPGSGAYEQYF

SEQ ID NO: 1723 - protein, 15 aa, synthetic construct
  REGION 1..15: note = Description of sequence: CRD3 from table 3
CASSFLGTGLNEQYF

SEQ ID NO: 1724 - protein, 14 aa, synthetic construct
  REGION 1..14: note = Description of sequence: CDR3 from table 4
CAYRSPPSSEKLVF

SEQ ID NO: 1725 - protein, 12 aa, synthetic construct
  REGION 1..12: note = Description of sequence: CDR3 from table 4
CAVNSDGQKLLF

SEQ ID NO: 1726 - protein, 10 aa, synthetic construct
  REGION 1..10: note = Description of sequence: CDR3 from table 4
CAPGDDKIIF

SEQ ID NO: 1727 - protein, 16 aa, synthetic construct
  REGION 1..16: note = Description of sequence: CDR3 from table 4
CASSGLSSGGSYIPTF

SEQ ID NO: 1728 - protein, 13 aa, synthetic construct
  REGION 1..13: note = Description of sequence: CDR3 from table 4
CAYRLGGSEKLVF

SEQ ID NO: 1729 - protein, 15 aa, synthetic construct
  REGION 1..15: note = Description of sequence: CDR3 from table 4
CAMRGGLYNFNKFYF

SEQ ID NO: 1730 - protein, 10 aa, synthetic construct
  REGION 1..10: note = Description of sequence: CDR3 from table 4
CAVTDYKLSF

SEQ ID NO: 1731 - protein, 10 aa, synthetic construct
  REGION 1..10: note = Description of sequence: CDR3 from table 4
CALQDDKIIF

SEQ ID NO: 1732 - protein, 12 aa, synthetic construct
  REGION 1..12: note = Description of sequence: CDR3 from table 4
CATGDLGNQFYF

SEQ ID NO: 1733 - protein, 15 aa, synthetic construct
  REGION 1..15: note = Description of sequence: CDR3 from table 4
CAMRELTSGTYKYIF

SEQ ID NO: 1734 - protein, 11 aa, synthetic construct
  REGION 1..11: note = Description of sequence: CDR3 from table 4
CARNTGNQFYF

SEQ ID NO: 1735 - protein, 13 aa, synthetic construct
  REGION 1..13: note = Description of sequence: CDR3 from table 4
CAEQGGSARQLTF

SEQ ID NO: 1736 - protein, 19 aa, synthetic construct
  REGION 1..19: note = Description of sequence: CDR3 from table 4
CATDAVSGTGGTSYGKLTF

SEQ ID NO: 1737 - protein, 10 aa, synthetic construct
  REGION 1..10: note = Description of sequence: CDR3 from table 4
CVVNDNDMRF

SEQ ID NO: 1738 - protein, 13 aa, synthetic construct
  REGION 1..13: note = Description of sequence: CDR3 from table 4
CVVSPYSRVCTQL

SEQ ID NO: 1739 - protein, 10 aa, synthetic construct
  REGION 1..10: note = Description of sequence: CDR3 from table 4
CAVSEDKLSF

SEQ ID NO: 1740 - protein, 12 aa, synthetic construct
  REGION 1..12: note = Description of sequence: CDR3 from table 4
CAVSGGSYIPTF

SEQ ID NO: 1741 - protein, 11 aa, synthetic construct
  REGION 1..11: note = Description of sequence: CDR3 from table 4
CAVGSARQLTF

SEQ ID NO: 1742 - protein, 11 aa, synthetic construct
  REGION 1..11: note = Description of sequence: CDR3 from table 4
CVVTASNDMRF

SEQ ID NO: 1743 - protein, 15 aa, synthetic construct
  REGION 1..15: note = Description of sequence: CDR3 from table 4
CACADYGGSQGNLIF

SEQ ID NO: 1744 - protein, 11 aa, synthetic construct
  REGION 1..11: note = Description of sequence: CDR3 from table 4
CATNTGNQFYF

SEQ ID NO: 1745 - protein, 10 aa, synthetic construct
  REGION 1..10: note = Description of sequence: CDR3 from table 4
CAFEGGKLIF

SEQ ID NO: 1746 - protein, 11 aa, synthetic construct
  REGION 1..11: note = Description of sequence: CDR3 from table 4
CAVNNDYKLSF

SEQ ID NO: 1747 - protein, 10 aa, synthetic construct
  REGION 1..10: note = Description of sequence: CDR3 from table 4
CAVTGNQFYF

SEQ ID NO: 1748 - protein, 10 aa, synthetic construct
  REGION 1..10: note = Description of sequence: CDR3 from table 4
CAGNNARLMF

SEQ ID NO: 1749 - protein, 11 aa, synthetic construct
  REGION 1..11: note = Description of sequence: CDR3 from table 4
CALDAGNMLTF

SEQ ID NO: 1750 - protein, 10 aa, synthetic construct
  REGION 1..10: note = Description of sequence: CDR3 from table 4
CAAGDARLMF

SEQ ID NO: 1751 - protein, 11 aa, synthetic construct
  REGION 1..11: note = Description of sequence: CDR3 from table 4
CAYIWGDKIIF

SEQ ID NO: 1752 - protein, 10 aa, synthetic construct
  REGION 1..10: note = Description of sequence: CDR3 from table 4
CAVDSGDMRF

SEQ ID NO: 1753 - protein, 13 aa, synthetic construct
  REGION 1..13: note = Description of sequence: CDR3 from table 4
CAYYGGSQGNLIF

SEQ ID NO: 1754 - protein, 13 aa, synthetic construct
  REGION 1..13: note = Description of sequence: CDR3 from table 4
CAVITGGGNKLTF

SEQ ID NO: 1755 - protein, 13 aa, synthetic construct
  REGION 1..13: note = Description of sequence: CDR3 from table 4
CAVGMDSSYKLIF

SEQ ID NO: 1756 - protein, 15 aa, synthetic construct
  REGION 1..15: note = Description of sequence: CDR3 from table 4
CLVGDVQEGFQKLVF

SEQ ID NO: 1757 - protein, 10 aa, synthetic construct
  REGION 1..10: note = Description of sequence: CDR3 from table 4
CVVADDKIIF

SEQ ID NO: 1758 - protein, 10 aa, synthetic construct
  REGION 1..10: note = Description of sequence: CDR3 from table 4
CASLRNMLTF

SEQ ID NO: 1759 - protein, 14 aa, synthetic construct
  REGION 1..14: note = Description of sequence: CDR3 from table 4
CVVSVSGGYNKLIF

SEQ ID NO: 1760 - protein, 14 aa, synthetic construct
  REGION 1..14: note = Description of sequence: CDR3 from table 4
CAMRVRTWGQNFVF

SEQ ID NO: 1761 - protein, 10 aa, synthetic construct
  REGION 1..10: note = Description of sequence: CDR3 from table 4
CVVSDDKIIF

SEQ ID NO: 1762 - protein, 14 aa, synthetic construct
  REGION 1..14: note = Description of sequence: CDR3 from table 4
CAWYSGGGADGLTF

SEQ ID NO: 1763 - protein, 12 aa, synthetic construct
  REGION 1..12: note = Description of sequence: CDR3 from table 4
CAVSPFGNVLHC

SEQ ID NO: 1764 - protein, 16 aa, synthetic construct
  REGION 1..16: note = Description of sequence: CDR3 from table 4
CAVSETGAGNNRKLIW

SEQ ID NO: 1765 - protein, 10 aa, synthetic construct
  REGION 1..10: note = Description of sequence: CDR3 from table 4
CAVSDDKIIF

SEQ ID NO: 1766 - protein, 13 aa, synthetic construct
  REGION 1..13: note = Description of sequence: CDR3 from table 4
CAVRLGGADGLTF

SEQ ID NO: 1767 - protein, 16 aa, synthetic construct
  REGION 1..16: note = Description of sequence: CDR3 from table 4
CAMRSSDPGGYNKLIF

SEQ ID NO: 1768 - protein, 13 aa, synthetic construct
  REGION 1..13: note = Description of sequence: CDR3 from table 4
CVVNGGGYQKVTF

SEQ ID NO: 1769 - protein, 14 aa, synthetic construct
  REGION 1..14: note = Description of sequence: CDR3 from table 4
CAMSQDYNTDKLIF

SEQ ID NO: 1770 - protein, 10 aa, synthetic construct
  REGION 1..10: note = Description of sequence: CDR3 from table 4
CAVTNDKIIF

SEQ ID NO: 1771 - protein, 13 aa, synthetic construct
  REGION 1..13: note = Description of sequence: CDR3 from table 4
CAGASTGDYKLSF

SEQ ID NO: 1772 - protein, 12 aa, synthetic construct
  REGION 1..12: note = Description of sequence: CDR3 from table 4
CAVVGGYNKLIF

SEQ ID NO: 1773 - protein, 13 aa, synthetic construct
  REGION 1..13: note = Description of sequence: CDR3 from table 4
CDPSGGNNRKLIW

SEQ ID NO: 1774 - protein, 13 aa, synthetic construct
  REGION 1..13: note = Description of sequence: CDR3 from table 4
CAATQGGSEKLVF

SEQ ID NO: 1775 - protein, 12 aa, synthetic construct
  REGION 1..12: note = Description of sequence: CDR3 from table 4
CAYGSNNNDMRF

SEQ ID NO: 1776 - protein, 10 aa, synthetic construct
  REGION 1..10: note = Description of sequence: CDR3 from table 4
CAVNNARLMF

SEQ ID NO: 1777 - protein, 16 aa, synthetic construct
  REGION 1..16: note = Description of sequence: CDR3 from table 4
CAVGAGPGAGSYQLTF

SEQ ID NO: 1778 - protein, 16 aa, synthetic construct
  REGION 1..16: note = Description of sequence: CDR3 from table 4
CAMREGTTDSWGKLQF

SEQ ID NO: 1779 - protein, 11 aa, synthetic construct
  REGION 1..11: note = Description of sequence: CDR3 from table 4
CAVDRDDKIIF

SEQ ID NO: 1780 - protein, 15 aa, synthetic construct
  REGION 1..15: note = Description of sequence: CDR3 from table 4
CAVQAADSSASKIIF

SEQ ID NO: 1781 - protein, 15 aa, synthetic construct
  REGION 1..15: note = Description of sequence: CDR3 from table 4
CLVGGYSGGYQKVTF

SEQ ID NO: 1782 - protein, 13 aa, synthetic construct
  REGION 1..13: note = Description of sequence: CDR3 from table 4
CAVRDYGNNRLAF

SEQ ID NO: 1783 - protein, 13 aa, synthetic construct
  REGION 1..13: note = Description of sequence: CDR3 from table 4
CAGIDNAGNMLTF

SEQ ID NO: 1784 - protein, 11 aa, synthetic construct
  REGION 1..11: note = Description of sequence: CDR3 from table 4
CAAKDNRKLIW

SEQ ID NO: 1785 - protein, 13 aa, synthetic construct
  REGION 1..13: note = Description of sequence: CDR3 from table 4
CLAFSGGYNKLIF

SEQ ID NO: 1786 - protein, 13 aa, synthetic construct
  REGION 1..13: note = Description of sequence: CDR3 from table 4
CASSTDSWGKLQF

SEQ ID NO: 1787 - protein, 15 aa, synthetic construct
  REGION 1..15: note = Description of sequence: CDR3 from table 4
CALSEAGYGNNRLAF

SEQ ID NO: 1788 - protein, 11 aa, synthetic construct
  REGION 1..11: note = Description of sequence: CDR3 from table 4
CAVNYGNMLTF

SEQ ID NO: 1789 - protein, 15 aa, synthetic construct
  REGION 1..15: note = Description of sequence: CDR3 from table 4
CAMREGMDSSYKLIF

SEQ ID NO: 1790 - protein, 11 aa, synthetic construct
  REGION 1..11: note = Description of sequence: CDR3 from table 4
CAVIGSGKLIF

SEQ ID NO: 1791 - protein, 13 aa, synthetic construct
  REGION 1..13: note = Description of sequence: CDR3 from table 4
CAGASSNTGKLIF

SEQ ID NO: 1792 - protein, 12 aa, synthetic construct
  REGION 1..12: note = Description of sequence: CDR3 from table 4
CAVMADGQKLLF

SEQ ID NO: 1793 - protein, 11 aa, synthetic construct
  REGION 1..11: note = Description of sequence: CDR3 from table 4
CILSNNNDMRF

SEQ ID NO: 1794 - protein, 14 aa, synthetic construct
  REGION 1..14: note = Description of sequence: CDR3 from table 4
CAAPRETSYDKVIF

SEQ ID NO: 1795 - protein, 14 aa, synthetic construct
  REGION 1..14: note = Description of sequence: CDR3 from table 4
CAGPTKTSYDKVIF

SEQ ID NO: 1796 - protein, 16 aa, synthetic construct
  REGION 1..16: note = Description of sequence: CDR3 from table 4
CATGLNYGGSQGNLIF

SEQ ID NO: 1797 - protein, 11 aa, synthetic construct
  REGION 1..11: note = Description of sequence: CDR3 from table 4
CAVFYGNKLVF

SEQ ID NO: 1798 - protein, 14 aa, synthetic construct
  REGION 1..14: note = Description of sequence: CDR3 from table 4
CAVSDLNYGQNFVF

SEQ ID NO: 1799 - protein, 15 aa, synthetic construct
  REGION 1..15: note = Description of sequence: CDR3 from table 4
CAVNMFSNYGQNFVF

SEQ ID NO: 1800 - protein, 15 aa, synthetic construct
  REGION 1..15: note = Description of sequence: CDR3 from table 4
CALRIGGSTLGRLYF

SEQ ID NO: 1801 - protein, 15 aa, synthetic construct
  REGION 1..15: note = Description of sequence: CDR3 from table 4
CVVNLPNTGFQKLVF

SEQ ID NO: 1802 - protein, 11 aa, synthetic construct
  REGION 1..11: note = Description of sequence: CDR3 from table 4
CAVNVANDMRF

SEQ ID NO: 1803 - protein, 11 aa, synthetic construct
  REGION 1..11: note = Description of sequence: CDR3 from table 4
CAVNGGGKLTF

SEQ ID NO: 1804 - protein, 13 aa, synthetic construct
  REGION 1..13: note = Description of sequence: CDR3 from table 4
CALPNFGNEKLTF

SEQ ID NO: 1805 - protein, 14 aa, synthetic construct
  REGION 1..14: note = Description of sequence: CDR3 from table 4
CALSGSDSWGKLQF

SEQ ID NO: 1806 - protein, 12 aa, synthetic construct
  REGION 1..12: note = Description of sequence: CDR3 from table 4
CAADNYGQNFVF

SEQ ID NO: 1807 - protein, 14 aa, synthetic construct
  REGION 1..14: note = Description of sequence: CDR3 from table 4
CALSENTGFQKLVF

SEQ ID NO: 1808 - protein, 11 aa, synthetic construct
  REGION 1..11: note = Description of sequence: CDR3 from table 4
CAAPGNTPLVF

SEQ ID NO: 1809 - protein, 11 aa, synthetic construct
  REGION 1..11: note = Description of sequence: CDR3 from table 4
CAYRSVPDMRF

SEQ ID NO: 1810 - protein, 14 aa, synthetic construct
  REGION 1..14: note = Description of sequence: CDR3 from table 4
CVVNFPTNAGKSTF

SEQ ID NO: 1811 - protein, 15 aa, synthetic construct
  REGION 1..15: note = Description of sequence: CDR3 from table 4
CAYRSALWGAQKLVF

SEQ ID NO: 1812 - protein, 10 aa, synthetic construct
  REGION 1..10: note = Description of sequence: CDR3 from table 4
CAVKDARLMF

SEQ ID NO: 1813 - protein, 11 aa, synthetic construct
  REGION 1..11: note = Description of sequence: CDR3 from table 4
CSLANAGKSTF

SEQ ID NO: 1814 - protein, 13 aa, synthetic construct
  REGION 1..13: note = Description of sequence: CDR3 from table 4
CAMSDTNAGKSTF

SEQ ID NO: 1815 - protein, 13 aa, synthetic construct
  REGION 1..13: note = Description of sequence: CDR3 from table 4
CAPDQTGANNLFF

SEQ ID NO: 1816 - protein, 11 aa, synthetic construct
  REGION 1..11: note = Description of sequence: CDR3 from table 4
CAGLNNARLMF

SEQ ID NO: 1817 - protein, 15 aa, synthetic construct
  REGION 1..15: note = Description of sequence: CDR3 from table 4
CAMTLSNFGNEKLTF

SEQ ID NO: 1818 - protein, 12 aa, synthetic construct
  REGION 1..12: note = Description of sequence: CDR3 from table 4
CAVGEYGNKLVF

SEQ ID NO: 1819 - protein, 14 aa, synthetic construct
  REGION 1..14: note = Description of sequence: CDR3 from table 4
CAVQTQGGSEKLVF

SEQ ID NO: 1820 - protein, 12 aa, synthetic construct
  REGION 1..12: note = Description of sequence: CDR3 from table 4
CAARGRDDKIIF

SEQ ID NO: 1821 - protein, 13 aa, synthetic construct
  REGION 1..13: note = Description of sequence: CDR3 from table 4
CAAFTSGNTPLVF

SEQ ID NO: 1822 - protein, 14 aa, synthetic construct
  REGION 1..14: note = Description of sequence: CDR3 from table 4
CVFPNQGGSEKLVF

SEQ ID NO: 1823 - protein, 16 aa, synthetic construct
  REGION 1..16: note = Description of sequence: CDR3 from table 4
CAVSVITQGGSEKLVF

SEQ ID NO: 1824 - protein, 11 aa, synthetic construct
  REGION 1..11: note = Description of sequence: CDR3 from table 4
CAVSSYDKVIF

SEQ ID NO: 1825 - protein, 12 aa, synthetic construct
  REGION 1..12: note = Description of sequence: CDR3 from table 4
CALMDSNYQLIW

SEQ ID NO: 1826 - protein, 11 aa, synthetic construct
  REGION 1..11: note = Description of sequence: CDR3 from table 4
CAVSGYSTLTF

SEQ ID NO: 1827 - protein, 13 aa, synthetic construct
  REGION 1..13: note = Description of sequence: CDR3 from table 4
CAGSGGGYQKVTF

SEQ ID NO: 1828 - protein, 11 aa, synthetic construct
  REGION 1..11: note = Description of sequence: CDR3 from table 4
CAADSWGKLQF

SEQ ID NO: 1829 - protein, 12 aa, synthetic construct
  REGION 1..12: note = Description of sequence: CDR3 from table 4
CAAPSGNTPLVF

SEQ ID NO: 1830 - protein, 15 aa, synthetic construct
  REGION 1..15: note = Description of sequence: CDR3 from table 4
CATDGEDDSWGKLQF

SEQ ID NO: 1831 - protein, 13 aa, synthetic construct
  REGION 1..13: note = Description of sequence: CDR3 from table 4
CAVGGGSQGNLIF

SEQ ID NO: 1832 - protein, 11 aa, synthetic construct
  REGION 1..11: note = Description of sequence: CDR3 from table 4
CAVNPSNQFYF

SEQ ID NO: 1833 - protein, 14 aa, synthetic construct
  REGION 1..14: note = Description of sequence: CDR3 from table 4
CAVNLNQAGTALIF

SEQ ID NO: 1834 - protein, 14 aa, synthetic construct
  REGION 1..14: note = Description of sequence: CDR3 from table 4
CATDEVDSSYKLIF

SEQ ID NO: 1835 - protein, 15 aa, synthetic construct
  REGION 1..15: note = Description of sequence: CDR3 from table 4
CAMSQSNFGNEKLTF

SEQ ID NO: 1836 - protein, 15 aa, synthetic construct
  REGION 1..15: note = Description of sequence: CDR3 from table 4
CATGFSGAGSYQLTF

SEQ ID NO: 1837 - protein, 13 aa, synthetic construct
  REGION 1..13: note = Description of sequence: CDR3 from table 4
CAMSDGGFQKLVF

SEQ ID NO: 1838 - protein, 12 aa, synthetic construct
  REGION 1..12: note = Description of sequence: CDR3 from table 4
CAVNTGFQKLVF

SEQ ID NO: 1839 - protein, 13 aa, synthetic construct
  REGION 1..13: note = Description of sequence: CDR3 from table 4
CAVNRDNFNKFYF

SEQ ID NO: 1840 - protein, 10 aa, synthetic construct
  REGION 1..10: note = Description of sequence: CDR3 from table 4
CAVNNNDMRF

SEQ ID NO: 1841 - protein, 13 aa, synthetic construct
  REGION 1..13: note = Description of sequence: CDR3 from table 4
CAVRYSSASKIIF

SEQ ID NO: 1842 - protein, 14 aa, synthetic construct
  REGION 1..14: note = Description of sequence: CDR3 from table 4
CAAFSGGGADGLTF

SEQ ID NO: 1843 - protein, 12 aa, synthetic construct
  REGION 1..12: note = Description of sequence: CDR3 from table 4
CAVGGGYQKVTF

SEQ ID NO: 1844 - protein, 17 aa, synthetic construct
  REGION 1..17: note = Description of sequence: CDR3 from table 4
CAMSVGGLTGGGNKLTF

SEQ ID NO: 1845 - protein, 12 aa, synthetic construct
  REGION 1..12: note = Description of sequence: CDR3 from table 4
CAVANAGNMLTF

SEQ ID NO: 1846 - protein, 14 aa, synthetic construct
  REGION 1..14: note = Description of sequence: CDR3 from table 4
CAVNTGGGADGLTF

SEQ ID NO: 1847 - protein, 12 aa, synthetic construct
  REGION 1..12: note = Description of sequence: CDR3 from table 4
CAAYNAGNMLTF

SEQ ID NO: 1848 - protein, 15 aa, synthetic construct
  REGION 1..15: note = Description of sequence: CDR3 from table 4
CALSLAEGNFNKFYF

SEQ ID NO: 1849 - protein, 16 aa, synthetic construct
  REGION 1..16: note = Description of sequence: CDR3 from table 4
CAPGIAGGTSYGKLTF

SEQ ID NO: 1850 - protein, 14 aa, synthetic construct
  REGION 1..14: note = Description of sequence: CDR3 from table 4
CAVPTFVNTGKLIF

SEQ ID NO: 1851 - protein, 12 aa, synthetic construct
  REGION 1..12: note = Description of sequence: CDR3 from table 4
CAVGRDGNQFYF

SEQ ID NO: 1852 - protein, 16 aa, synthetic construct
  REGION 1..16: note = Description of sequence: CDR3 from table 4
CAVNGDSGGSNYKLTF

SEQ ID NO: 1853 - protein, 15 aa, synthetic construct
  REGION 1..15: note = Description of sequence: CDR3 from table 4
CVVSEEYTNAGKSTF

SEQ ID NO: 1854 - protein, 14 aa, synthetic construct
  REGION 1..14: note = Description of sequence: CDR3 from table 4
CAMREGTGRRALTF

SEQ ID NO: 1855 - protein, 12 aa, synthetic construct
  REGION 1..12: note = Description of sequence: CDR3 from table 4
CAGGGSQGNLIF

SEQ ID NO: 1856 - protein, 14 aa, synthetic construct
  REGION 1..14: note = Description of sequence: CDR3 from table 4
CAVPTNFGNEKLTF

SEQ ID NO: 1857 - protein, 10 aa, synthetic construct
  REGION 1..10: note = Description of sequence: CDR3 from table 4
CASTGGKLIF

SEQ ID NO: 1858 - protein, 12 aa, synthetic construct
  REGION 1..12: note = Description of sequence: CDR3 from table 4
CAVSSGTYKYIF

SEQ ID NO: 1859 - protein, 14 aa, synthetic construct
  REGION 1..14: note = Description of sequence: CDR3 from table 4
CAVRDDTGGFKTIF

SEQ ID NO: 1860 - protein, 13 aa, synthetic construct
  REGION 1..13: note = Description of sequence: CDR3 from table 4
CAFGDNYGQNFVF

SEQ ID NO: 1861 - protein, 13 aa, synthetic construct
  REGION 1..13: note = Description of sequence: CDR3 from table 4
CAGLADSNYQLIW

SEQ ID NO: 1862 - protein, 11 aa, synthetic construct
  REGION 1..11: note = Description of sequence: CDR3 from table 4
CAMDSSYKLIF

SEQ ID NO: 1863 - protein, 10 aa, synthetic construct
  REGION 1..10: note = Description of sequence: CDR3 from table 4
CAVEGSRLTF

SEQ ID NO: 1864 - protein, 13 aa, synthetic construct
  REGION 1..13: note = Description of sequence: CDR3 from table 4
CAVNPTGYSTLTF

SEQ ID NO: 1865 - protein, 13 aa, synthetic construct
  REGION 1..13: note = Description of sequence: CDR3 from table 4
CALPKGGYSTLTF

SEQ ID NO: 1866 - protein, 12 aa, synthetic construct
  REGION 1..12: note = Description of sequence: CDR3 from table 4
CALNFGNEKLTF

SEQ ID NO: 1867 - protein, 11 aa, synthetic construct
  REGION 1..11: note = Description of sequence: CDR3 from table 4
CAALTGNQFYF

SEQ ID NO: 1868 - protein, 13 aa, synthetic construct
  REGION 1..13: note = Description of sequence: CDR3 from table 4
CVVNPFGNEKLTF

SEQ ID NO: 1869 - protein, 13 aa, synthetic construct
  REGION 1..13: note = Description of sequence: CDR3 from table 4
CAGVPSNTGKLIF

SEQ ID NO: 1870 - protein, 14 aa, synthetic construct
  REGION 1..14: note = Description of sequence: CDR3 from table 4
CAASLGGGADGLTF

SEQ ID NO: 1871 - protein, 13 aa, synthetic construct
  REGION 1..13: note = Description of sequence: CDR3 from table 4
CALAIGFGNVLHC

SEQ ID NO: 1872 - protein, 15 aa, synthetic construct
  REGION 1..15: note = Description of sequence: CDR3 from table 4
CAVSFGSSNTGKLIF

SEQ ID NO: 1873 - protein, 13 aa, synthetic construct
  REGION 1..13: note = Description of sequence: CDR3 from table 4
CAASGGGADGLTF

SEQ ID NO: 1874 - protein, 11 aa, synthetic construct
  REGION 1..11: note = Description of sequence: CDR3 from table 4
CAGNTGNQFYF

SEQ ID NO: 1875 - protein, 15 aa, synthetic construct
  REGION 1..15: note = Description of sequence: CDR3 from table 4
FAGGGGSSNTGKLIF

SEQ ID NO: 1876 - protein, 12 aa, synthetic construct
  REGION 1..12: note = Description of sequence: CDR3 from table 4
CAVTGQGGKLIF

SEQ ID NO: 1877 - protein, 13 aa, synthetic construct
  REGION 1..13: note = Description of sequence: CDR3 from table 4
CAVGLGFGNVLHC

SEQ ID NO: 1878 - protein, 17 aa, synthetic construct
  REGION 1..17: note = Description of sequence: CDR3 from table 4
CAMREGPGGTSYGKLTF

SEQ ID NO: 1879 - protein, 15 aa, synthetic construct
  REGION 1..15: note = Description of sequence: CDR3 from table 4
CAGRSYNTNAGKSTF

SEQ ID NO: 1880 - protein, 10 aa, synthetic construct
  REGION 1..10: note = Description of sequence: CDR3 from table 4
CAVSTDKLIF

SEQ ID NO: 1881 - protein, 12 aa, synthetic construct
  REGION 1..12: note = Description of sequence: CDR3 from table 4
CAVSNQGGKLIF

SEQ ID NO: 1882 - protein, 14 aa, synthetic construct
  REGION 1..14: note = Description of sequence: CDR3 from table 4
CVVSAMGGGNKLTF

SEQ ID NO: 1883 - protein, 11 aa, synthetic construct
  REGION 1..11: note = Description of sequence: CDR3 from table 4
CALLDGNKLVF

SEQ ID NO: 1884 - protein, 16 aa, synthetic construct
  REGION 1..16: note = Description of sequence: CDR3 from table 4
CAVRDMHPRGYNKLIF

SEQ ID NO: 1885 - protein, 15 aa, synthetic construct
  REGION 1..15: note = Description of sequence: CDR3 from table 4
CAMRAFGADGQKLLF

SEQ ID NO: 1886 - protein, 14 aa, synthetic construct
  REGION 1..14: note = Description of sequence: CDR3 from table 4
CAPTIYNQGGKLIF

SEQ ID NO: 1887 - protein, 8 aa, synthetic construct
  REGION 1..8: note = Description of sequence: CDR3 from table 4
CAGYKLVF

SEQ ID NO: 1888 - protein, 13 aa, synthetic construct
  REGION 1..13: note = Description of sequence: CDR3 from table 4
CAGGPYNTDKLIF

SEQ ID NO: 1889 - protein, 15 aa, synthetic construct
  REGION 1..15: note = Description of sequence: CDR3 from table 4
CASSFLGTGLNEQYF

SEQ ID NO: 1890 - protein, 13 aa, synthetic construct
  REGION 1..13: note = Description of sequence: CDR3 from table 4
CAISEGAAYGYTF

SEQ ID NO: 1891 - protein, 13 aa, synthetic construct
  REGION 1..13: note = Description of sequence: CDR3 from table 4
CATSSSGAYEQYF

SEQ ID NO: 1892 - protein, 15 aa, synthetic construct
  REGION 1..15: note = Description of sequence: CDR3 from table 4
CASSFPPAGTGELFF

SEQ ID NO: 1893 - protein, 18 aa, synthetic construct
  REGION 1..18: note = Description of sequence: CDR3 from table 4
CASSPQGQGESGANVLTF

SEQ ID NO: 1894 - protein, 12 aa, synthetic construct
  REGION 1..12: note = Description of sequence: CDR3 from table 4
CASSEALYEQYF

SEQ ID NO: 1895 - protein, 13 aa, synthetic construct
  REGION 1..13: note = Description of sequence: CDR3 from table 4
CASSQGAAYEQYF

SEQ ID NO: 1896 - protein, 13 aa, synthetic construct
  REGION 1..13: note = Description of sequence: CDR3 from table 4
CASSDGVSYGYTF

SEQ ID NO: 1897 - protein, 13 aa, synthetic construct
  REGION 1..13: note = Description of sequence: CDR3 from table 4
CASSLGFGYEQFF

SEQ ID NO: 1898 - protein, 13 aa, synthetic construct
  REGION 1..13: note = Description of sequence: CDR3 from table 4
CSARSGVGNTIYF

SEQ ID NO: 1899 - protein, 15 aa, synthetic construct
  REGION 1..15: note = Description of sequence: CDR3 from table 4
CSPLGGQGVWDEQFF

SEQ ID NO: 1900 - protein, 15 aa, synthetic construct
  REGION 1..15: note = Description of sequence: CDR3 from table 4
CAISEPGTGDTEAFF

SEQ ID NO: 1901 - protein, 15 aa, synthetic construct
  REGION 1..15: note = Description of sequence: CDR3 from table 4
CASSIYGAGYTEAFF

SEQ ID NO: 1902 - protein, 13 aa, synthetic construct
  REGION 1..13: note = Description of sequence: CDR3 from table 4
CASSFGASYGYTF

SEQ ID NO: 1903 - protein, 17 aa, synthetic construct
  REGION 1..17: note = Description of sequence: CDR3 from table 4
CATSVGSGPLSTDTQYF

SEQ ID NO: 1904 - protein, 15 aa, synthetic construct
  REGION 1..15: note = Description of sequence: CDR3 from table 4
CASSQETSPNYGYTF

SEQ ID NO: 1905 - protein, 16 aa, synthetic construct
  REGION 1..16: note = Description of sequence: CDR3 from table 4
CASSPTTRTRYYGYTF

SEQ ID NO: 1906 - protein, 14 aa, synthetic construct
  REGION 1..14: note = Description of sequence: CDR3 from table 4
CSAIGPRGTDTQYF

SEQ ID NO: 1907 - protein, 16 aa, synthetic construct
  REGION 1..16: note = Description of sequence: CDR3 from table 4
CASSQEMASVQETQYF

SEQ ID NO: 1908 - protein, 15 aa, synthetic construct
  REGION 1..15: note = Description of sequence: CDR3 from table 4
CASSLGGQGAYEQYF

SEQ ID NO: 1909 - protein, 13 aa, synthetic construct
  REGION 1..13: note = Description of sequence: CDR3 from table 4
CATSPRGGHEQYF

SEQ ID NO: 1910 - protein, 12 aa, synthetic construct
  REGION 1..12: note = Description of sequence: CDR3 from table 4
CASLGLEYEQYF

SEQ ID NO: 1911 - protein, 15 aa, synthetic construct
  REGION 1..15: note = Description of sequence: CDR3 from table 4
CASSATGVSPYEQYF

SEQ ID NO: 1912 - protein, 13 aa, synthetic construct
  REGION 1..13: note = Description of sequence: CDR3 from table 4
CASSQGLSYEQYF

SEQ ID NO: 1913 - protein, 13 aa, synthetic construct
  REGION 1..13: note = Description of sequence: CDR3 from table 4
CASSVAGSTEAFF

SEQ ID NO: 1914 - protein, 9 aa, synthetic construct
  REGION 1..9: note = Description of sequence: CDR3 from table 4
CASNQPQHF

SEQ ID NO: 1915 - protein, 15 aa, synthetic construct
  REGION 1..15: note = Description of sequence: CDR3 from table 4
CSARDPSQGGYEQYF

SEQ ID NO: 1916 - protein, 14 aa, synthetic construct
  REGION 1..14: note = Description of sequence: CDR3 from table 4
CASSVDGGSQPQHF

SEQ ID NO: 1917 - protein, 15 aa, synthetic construct
  REGION 1..15: note = Description of sequence: CDR3 from table 4
CASSLPAGVGDTQYF

SEQ ID NO: 1918 - protein, 13 aa, synthetic construct
  REGION 1..13: note = Description of sequence: CDR3 from table 4
CASSIGLNQPQHF

SEQ ID NO: 1919 - protein, 15 aa, synthetic construct
  REGION 1..15: note = Description of sequence: CDR3 from table 4
CASSVGGVPYNEQFF

SEQ ID NO: 1920 - protein, 12 aa, synthetic construct
  REGION 1..12: note = Description of sequence: CDR3 from table 4
CASSLVESEQFF

SEQ ID NO: 1921 - protein, 12 aa, synthetic construct
  REGION 1..12: note = Description of sequence: CDR3 from table 4
CASSFANSPLHF

SEQ ID NO: 1922 - protein, 16 aa, synthetic construct
  REGION 1..16: note = Description of sequence: CDR3 from table 4
CASSLTALGAAYVYTF

SEQ ID NO: 1923 - protein, 11 aa, synthetic construct
  REGION 1..11: note = Description of sequence: CDR3 from table 4
CSATEGSGYTF

SEQ ID NO: 1924 - protein, 14 aa, synthetic construct
  REGION 1..14: note = Description of sequence: CDR3 from table 4
CASSRRDSNTEAFF

SEQ ID NO: 1925 - protein, 13 aa, synthetic construct
  REGION 1..13: note = Description of sequence: CDR3 from table 4
CASSFWGADTQYF

SEQ ID NO: 1926 - protein, 12 aa, synthetic construct
  REGION 1..12: note = Description of sequence: CDR3 from table 4
CASTGQNPEAFF

SEQ ID NO: 1927 - protein, 16 aa, synthetic construct
  REGION 1..16: note = Description of sequence: CDR3 from table 4
CASSEVRGPWAETQYF

SEQ ID NO: 1928 - protein, 15 aa, synthetic construct
  REGION 1..15: note = Description of sequence: CDR3 from table 4
CATSRTGTGSTEAFF

SEQ ID NO: 1929 - protein, 15 aa, synthetic construct
  REGION 1..15: note = Description of sequence: CDR3 from table 4
CASSPTGTGYNEQFF

SEQ ID NO: 1930 - protein, 11 aa, synthetic construct
  REGION 1..11: note = Description of sequence: CDR3 from table 4
CSAWWGAEQYF

SEQ ID NO: 1931 - protein, 15 aa, synthetic construct
  REGION 1..15: note = Description of sequence: CDR3 from table 4
CASSIQGRGDTEAFF

SEQ ID NO: 1932 - protein, 13 aa, synthetic construct
  REGION 1..13: note = Description of sequence: CDR3 from table 4
CASSAGLFPEQFF

SEQ ID NO: 1933 - protein, 11 aa, synthetic construct
  REGION 1..11: note = Description of sequence: CDR3 from table 4
CASRTRQEAFF

SEQ ID NO: 1934 - protein, 13 aa, synthetic construct
  REGION 1..13: note = Description of sequence: CDR3 from table 4
CASSIVGNTEAFF

SEQ ID NO: 1935 - protein, 13 aa, synthetic construct
  REGION 1..13: note = Description of sequence: CDR3 from table 4
CASSFWGLGELFF

SEQ ID NO: 1936 - protein, 11 aa, synthetic construct
  REGION 1..11: note = Description of sequence: CDR3 from table 4
CASSPMNEQFF

SEQ ID NO: 1937 - protein, 13 aa, synthetic construct
  REGION 1..13: note = Description of sequence: CDR3 from table 4
CASGRGPNYGYTF

SEQ ID NO: 1938 - protein, 15 aa, synthetic construct
  REGION 1..15: note = Description of sequence: CDR3 from table 4
CASSLLGLIKETQYF

SEQ ID NO: 1939 - protein, 11 aa, synthetic construct
  REGION 1..11: note = Description of sequence: CDR3 from table 4
CASSDSYEQYF

SEQ ID NO: 1940 - protein, 14 aa, synthetic construct
  REGION 1..14: note = Description of sequence: CDR3 from table 4
CASSPGQVSYEQYF

SEQ ID NO: 1941 - protein, 13 aa, synthetic construct
  REGION 1..13: note = Description of sequence: CDR3 from table 4
CASSLAGGGEQYF

SEQ ID NO: 1942 - protein, 15 aa, synthetic construct
  REGION 1..15: note = Description of sequence: CDR3 from table 4
CASSVYSGGYNEQFF

SEQ ID NO: 1943 - protein, 14 aa, synthetic construct
  REGION 1..14: note = Description of sequence: CDR3 from table 4
CASSVGVGTDTQYF

SEQ ID NO: 1944 - protein, 13 aa, synthetic construct
  REGION 1..13: note = Description of sequence: CDR3 from table 4
CSVDNKAGGGYTF

SEQ ID NO: 1945 - protein, 15 aa, synthetic construct
  REGION 1..15: note = Description of sequence: CDR3 from table 4
CASSYSPGTGNTIYF

SEQ ID NO: 1946 - protein, 16 aa, synthetic construct
  REGION 1..16: note = Description of sequence: CDR3 from table 4
CASSEGPGQGSYEQYF

SEQ ID NO: 1947 - protein, 16 aa, synthetic construct
  REGION 1..16: note = Description of sequence: CDR3 from table 4
CASSEAFGRPNYGYTF

SEQ ID NO: 1948 - protein, 13 aa, synthetic construct
  REGION 1..13: note = Description of sequence: CDR3 from table 4
CASRSHPTYEQYF

SEQ ID NO: 1949 - protein, 14 aa, synthetic construct
  REGION 1..14: note = Description of sequence: CDR3 from table 4
CSARDLGLHQPQHF

SEQ ID NO: 1950 - protein, 16 aa, synthetic construct
  REGION 1..16: note = Description of sequence: CDR3 from table 4
CASSFDLAGVNYEQYF

SEQ ID NO: 1951 - protein, 19 aa, synthetic construct
  REGION 1..19: note = Description of sequence: CDR3 from table 4
CASSPLRGPADRTGTEAFF

SEQ ID NO: 1952 - protein, 15 aa, synthetic construct
  REGION 1..15: note = Description of sequence: CDR3 from table 4
CASSFWAGGWTEAFF

SEQ ID NO: 1953 - protein, 13 aa, synthetic construct
  REGION 1..13: note = Description of sequence: CDR3 from table 4
CASSYGSNYGYTF

SEQ ID NO: 1954 - protein, 13 aa, synthetic construct
  REGION 1..13: note = Description of sequence: CDR3 from table 4
CATRGGEGQPQHF

SEQ ID NO: 1955 - protein, 14 aa, synthetic construct
  REGION 1..14: note = Description of sequence: CDR3 from table 4
CASSLGDWDLEAFF

SEQ ID NO: 1956 - protein, 13 aa, synthetic construct
  REGION 1..13: note = Description of sequence: CDR3 from table 4
CASGPGTAYGYTF

SEQ ID NO: 1957 - protein, 14 aa, synthetic construct
  REGION 1..14: note = Description of sequence: CDR3 from table 4
CASSLGPAYNEQFF

SEQ ID NO: 1958 - protein, 16 aa, synthetic construct
  REGION 1..16: note = Description of sequence: CDR3 from table 4
CASSHDAGASTGELFF

SEQ ID NO: 1959 - protein, 13 aa, synthetic construct
  REGION 1..13: note = Description of sequence: CDR3 from table 4
CASSSGAAYEQYF

SEQ ID NO: 1960 - protein, 19 aa, synthetic construct
  REGION 1..19: note = Description of sequence: CDR3 from table 4
CASSESFPASGGSTDTQYF

SEQ ID NO: 1961 - protein, 16 aa, synthetic construct
  REGION 1..16: note = Description of sequence: CDR3 from table 4
CASSYATEVAGETQYF

SEQ ID NO: 1962 - protein, 12 aa, synthetic construct
  REGION 1..12: note = Description of sequence: CDR3 from table 4
CASMTNNQPQHF

SEQ ID NO: 1963 - protein, 14 aa, synthetic construct
  REGION 1..14: note = Description of sequence: CDR3 from table 4
CASSQTAGGYEQYF

SEQ ID NO: 1964 - protein, 15 aa, synthetic construct
  REGION 1..15: note = Description of sequence: CDR3 from table 4
CASSVGGVSYNEQFF

SEQ ID NO: 1965 - protein, 14 aa, synthetic construct
  REGION 1..14: note = Description of sequence: CDR3 from table 4
CASSQVSSTGELFF

SEQ ID NO: 1966 - protein, 17 aa, synthetic construct
  REGION 1..17: note = Description of sequence: CDR3 from table 4
CASSQTIGTGFSNEQFF

SEQ ID NO: 1967 - protein, 15 aa, synthetic construct
  REGION 1..15: note = Description of sequence: CDR3 from table 4
CAWSISDSSRVEAFF

SEQ ID NO: 1968 - protein, 12 aa, synthetic construct
  REGION 1..12: note = Description of sequence: CDR3 from table 4
CASSSANYGYTF

SEQ ID NO: 1969 - protein, 13 aa, synthetic construct
  REGION 1..13: note = Description of sequence: CDR3 from table 4
CASSLFNQETQYF

SEQ ID NO: 1970 - protein, 15 aa, synthetic construct
  REGION 1..15: note = Description of sequence: CDR3 from table 4
CASSYATGIPDTQYF

SEQ ID NO: 1971 - protein, 15 aa, synthetic construct
  REGION 1..15: note = Description of sequence: CDR3 from table 4
CASTYGGGALNEQFF

SEQ ID NO: 1972 - protein, 15 aa, synthetic construct
  REGION 1..15: note = Description of sequence: CDR3 from table 4
CASSASGGRDYGYTF

SEQ ID NO: 1973 - protein, 19 aa, synthetic construct
  REGION 1..19: note = Description of sequence: CDR3 from table 4
CASRTGTSGGFPNTGELFF

SEQ ID NO: 1974 - protein, 14 aa, synthetic construct
  REGION 1..14: note = Description of sequence: CDR3 from table 4
CASSYSIGNTEAFF

SEQ ID NO: 1975 - protein, 11 aa, synthetic construct
  REGION 1..11: note = Description of sequence: CDR3 from table 4
CATSGSYEQYF

SEQ ID NO: 1976 - protein, 13 aa, synthetic construct
  REGION 1..13: note = Description of sequence: CDR3 from table 4
CASSYRFDSPLHF

SEQ ID NO: 1977 - protein, 17 aa, synthetic construct
  REGION 1..17: note = Description of sequence: CDR3 from table 4
CASSESTIVQGYNEQFF

SEQ ID NO: 1978 - protein, 14 aa, synthetic construct
  REGION 1..14: note = Description of sequence: CDR3 from table 4
CAWSVSGLGYGYTF

SEQ ID NO: 1979 - protein, 14 aa, synthetic construct
  REGION 1..14: note = Description of sequence: CDR3 from table 4
CAISETTGINEQFF

SEQ ID NO: 1980 - protein, 13 aa, synthetic construct
  REGION 1..13: note = Description of sequence: CDR3 from table 4
CAWSGFSRTEAFF

SEQ ID NO: 1981 - protein, 15 aa, synthetic construct
  REGION 1..15: note = Description of sequence: CDR3 from table 4
CASSLGQGLSYEQYF

SEQ ID NO: 1982 - protein, 15 aa, synthetic construct
  REGION 1..15: note = Description of sequence: CDR3 from table 4
CASSLAENSGNTIYF

SEQ ID NO: 1983 - protein, 15 aa, synthetic construct
  REGION 1..15: note = Description of sequence: CDR3 from table 4
CASSLVGGITGELFF

SEQ ID NO: 1984 - protein, 16 aa, synthetic construct
  REGION 1..16: note = Description of sequence: CDR3 from table 4
CASSTSAGFSNQPQHF

SEQ ID NO: 1985 - protein, 15 aa, synthetic construct
  REGION 1..15: note = Description of sequence: CDR3 from table 4
CASSLQGGYGGGYTF

SEQ ID NO: 1986 - protein, 13 aa, synthetic construct
  REGION 1..13: note = Description of sequence: CDR3 from table 4
CASSDMAGDGYTF

SEQ ID NO: 1987 - protein, 12 aa, synthetic construct
  REGION 1..12: note = Description of sequence: CDR3 from table 4
CASSPGPYEQYF

SEQ ID NO: 1988 - protein, 14 aa, synthetic construct
  REGION 1..14: note = Description of sequence: CDR3 from table 4
CASSLGGLGQPQHF

SEQ ID NO: 1989 - protein, 13 aa, synthetic construct
  REGION 1..13: note = Description of sequence: CDR3 from table 4
CASSWAPHYEQYF

SEQ ID NO: 1990 - protein, 15 aa, synthetic construct
  REGION 1..15: note = Description of sequence: CDR3 from table 4
CASSQDPGNGNTIYF

SEQ ID NO: 1991 - protein, 12 aa, synthetic construct
  REGION 1..12: note = Description of sequence: CDR3 from table 4
CASSAGRYEQYF

SEQ ID NO: 1992 - protein, 15 aa, synthetic construct
  REGION 1..15: note = Description of sequence: CDR3 from table 4
CASSVGGFGNQPQHF

SEQ ID NO: 1993 - protein, 16 aa, synthetic construct
  REGION 1..16: note = Description of sequence: CDR3 from table 4
CATSTGWRTGTDTQYF

SEQ ID NO: 1994 - protein, 12 aa, synthetic construct
  REGION 1..12: note = Description of sequence: CDR3 from table 4
CSALTGNQPQHF

SEQ ID NO: 1995 - protein, 14 aa, synthetic construct
  REGION 1..14: note = Description of sequence: CDR3 from table 4
CSVGLGQTGTEAFF

SEQ ID NO: 1996 - protein, 16 aa, synthetic construct
  REGION 1..16: note = Description of sequence: CDR3 from table 4
CASSYSQGVYTGELFF

SEQ ID NO: 1997 - protein, 12 aa, synthetic construct
  REGION 1..12: note = Description of sequence: CDR3 from table 4
CASSWDYTEQYF

SEQ ID NO: 1998 - protein, 14 aa, synthetic construct
  REGION 1..14: note = Description of sequence: CDR3 from table 4
CATSDSTGSYGYTF

SEQ ID NO: 1999 - protein, 13 aa, synthetic construct
  REGION 1..13: note = Description of sequence: CDR3 from table 4
CASLQGSGSPLHF

SEQ ID NO: 2000 - protein, 14 aa, synthetic construct
  REGION 1..14: note = Description of sequence: CDR3 from table 4
CASSVGGLGQPQHF

SEQ ID NO: 2001 - protein, 11 aa, synthetic construct
  REGION 1..11: note = Description of sequence: CDR3 from table 4
CASSMAGEQYF

SEQ ID NO: 2002 - protein, 15 aa, synthetic construct
  REGION 1..15: note = Description of sequence: CDR3 from table 4
CASVLGGSSYNEQFF

SEQ ID NO: 2003 - protein, 14 aa, synthetic construct
  REGION 1..14: note = Description of sequence: CDR3 from table 4
CASSPYRTGNIQYF

SEQ ID NO: 2004 - protein, 13 aa, synthetic construct
  REGION 1..13: note = Description of sequence: CDR3 from table 4
CASRGPYHNEQFF

SEQ ID NO: 2005 - protein, 13 aa, synthetic construct
  REGION 1..13: note = Description of sequence: CDR3 from table 4
CASSQVGSTEAFF

SEQ ID NO: 2006 - protein, 11 aa, synthetic construct
  REGION 1..11: note = Description of sequence: CDR3 from table 4
CASTSYTEAFF

SEQ ID NO: 2007 - protein, 16 aa, synthetic construct
  REGION 1..16: note = Description of sequence: CDR3 from table 4
CASSPGQSPTNEKLFF

SEQ ID NO: 2008 - protein, 14 aa, synthetic construct
  REGION 1..14: note = Description of sequence: CDR3 from table 4
CASSLVMDNYGYTF

SEQ ID NO: 2009 - protein, 13 aa, synthetic construct
  REGION 1..13: note = Description of sequence: CDR3 from table 4
CASSSPGGETQYF

SEQ ID NO: 2010 - protein, 14 aa, synthetic construct
  REGION 1..14: note = Description of sequence: CDR3 from table 4
CASSPEPGSHEQYF

SEQ ID NO: 2011 - protein, 12 aa, synthetic construct
  REGION 1..12: note = Description of sequence: CDR3 from table 4
CASRPGGGGYTF

SEQ ID NO: 2012 - protein, 14 aa, synthetic construct
  REGION 1..14: note = Description of sequence: CDR3 from table 4
CASMRGAHTGELFF

SEQ ID NO: 2013 - protein, 12 aa, synthetic construct
  REGION 1..12: note = Description of sequence: CDR3 from table 4
CSASTGLTEAFF

SEQ ID NO: 2014 - protein, 17 aa, synthetic construct
  REGION 1..17: note = Description of sequence: CDR3 from table 4
CASSLVRDLLFTDTQYF

SEQ ID NO: 2015 - protein, 17 aa, synthetic construct
  REGION 1..17: note = Description of sequence: CDR3 from table 4
CASSLSGQGATNEKLFF

SEQ ID NO: 2016 - protein, 16 aa, synthetic construct
  REGION 1..16: note = Description of sequence: CDR3 from table 4
CASSQEVGLAGETQYF

SEQ ID NO: 2017 - protein, 13 aa, synthetic construct
  REGION 1..13: note = Description of sequence: CDR3 from table 4
CASTQGDTGELFF

SEQ ID NO: 2018 - protein, 14 aa, synthetic construct
  REGION 1..14: note = Description of sequence: CDR3 from table 4
CASSSDRAGSPLHF

SEQ ID NO: 2019 - protein, 14 aa, synthetic construct
  REGION 1..14: note = Description of sequence: CDR3 from table 4
CASSHRGSGNTIYF

SEQ ID NO: 2020 - protein, 18 aa, synthetic construct
  REGION 1..18: note = Description of sequence: CDR3 from table 4
CASSLADVGQYDTDTQYF

SEQ ID NO: 2021 - protein, 13 aa, synthetic construct
  REGION 1..13: note = Description of sequence: CDR3 from table 4
CASSGPARDTQYF

SEQ ID NO: 2022 - protein, 11 aa, synthetic construct
  REGION 1..11: note = Description of sequence: CDR3 from table 4
CASTWTGEQYF

SEQ ID NO: 2023 - protein, 13 aa, synthetic construct
  REGION 1..13: note = Description of sequence: CDR3 from table 4
CASSLAYSYEQYF

SEQ ID NO: 2024 - protein, 15 aa, synthetic construct
  REGION 1..15: note = Description of sequence: CDR3 from table 4
CASSYETGGSYEQYF

SEQ ID NO: 2025 - protein, 13 aa, synthetic construct
  REGION 1..13: note = Description of sequence: CDR3 from table 4
CASTYGGLNEQYF

SEQ ID NO: 2026 - protein, 15 aa, synthetic construct
  REGION 1..15: note = Description of sequence: CDR3 from table 4
CASSTTGGGNYEQYF

SEQ ID NO: 2027 - protein, 13 aa, synthetic construct
  REGION 1..13: note = Description of sequence: CDR3 from table 4
CASSLWGAGELFF

SEQ ID NO: 2028 - protein, 12 aa, synthetic construct
  REGION 1..12: note = Description of sequence: CDR3 from table 4
CASNGGSYEQYF

SEQ ID NO: 2029 - protein, 12 aa, synthetic construct
  REGION 1..12: note = Description of sequence: CDR3 from table 4
CASSLGDTEQFF

SEQ ID NO: 2030 - protein, 16 aa, synthetic construct
  REGION 1..16: note = Description of sequence: CDR3 from table 4
CASSLERLRVYSGYTF

SEQ ID NO: 2031 - protein, 14 aa, synthetic construct
  REGION 1..14: note = Description of sequence: CDR3 from table 4
CATHGVSSRETQYF

SEQ ID NO: 2032 - protein, 16 aa, synthetic construct
  REGION 1..16: note = Description of sequence: CDR3 from table 4
CASSLEGTGLTDTQYF

SEQ ID NO: 2033 - protein, 15 aa, synthetic construct
  REGION 1..15: note = Description of sequence: CDR3 from table 4
CASSLSTVFTDTQYF

SEQ ID NO: 2034 - protein, 13 aa, synthetic construct
  REGION 1..13: note = Description of sequence: CDR3 from table 4
CASSLLGNTEAFF

SEQ ID NO: 2035 - protein, 13 aa, synthetic construct
  REGION 1..13: note = Description of sequence: CDR3 from table 4
CASSTTEAYEQYF

SEQ ID NO: 2036 - protein, 15 aa, synthetic construct
  REGION 1..15: note = Description of sequence: CDR3 from table 4
CASSTALAASYEQYF

SEQ ID NO: 2037 - protein, 13 aa, synthetic construct
  REGION 1..13: note = Description of sequence: CDR3 from table 4
CASSLGVGQPQHF

SEQ ID NO: 2038 - protein, 19 aa, synthetic construct
  REGION 1..19: note = Description of sequence: CDR3 from table 4
CASSVGSGGRPSSYNEQFF

SEQ ID NO: 2039 - protein, 16 aa, synthetic construct
  REGION 1..16: note = Description of sequence: CDR3 from table 4
CASSALAGGQADTQYF

SEQ ID NO: 2040 - protein, 15 aa, synthetic construct
  REGION 1..15: note = Description of sequence: CDR3 from table 4
CASSSGPTMGGKLFF

SEQ ID NO: 2041 - protein, 13 aa, synthetic construct
  REGION 1..13: note = Description of sequence: CDR3 from table 4
CASNSGGYNEQFF

SEQ ID NO: 2042 - protein, 15 aa, synthetic construct
  REGION 1..15: note = Description of sequence: CDR3 from table 4
CASSTTGTGLLEQYF

SEQ ID NO: 2043 - protein, 14 aa, synthetic construct
  REGION 1..14: note = Description of sequence: CDR3 from table 4
CASSSGPRGNEQFF

SEQ ID NO: 2044 - protein, 13 aa, synthetic construct
  REGION 1..13: note = Description of sequence: CDR3 from table 4
CASSQGSGQPQHF

SEQ ID NO: 2045 - protein, 15 aa, synthetic construct
  REGION 1..15: note = Description of sequence: CDR3 from table 4
CSARHPGVSTDTQYF

SEQ ID NO: 2046 - protein, 16 aa, synthetic construct
  REGION 1..16: note = Description of sequence: CDR3 from table 4
CASSPWRGPFQETQYF

SEQ ID NO: 2047 - protein, 12 aa, synthetic construct
  REGION 1..12: note = Description of sequence: CDR3 from table 4
CASSPGKTEAFF

SEQ ID NO: 2048 - protein, 13 aa, synthetic construct
  REGION 1..13: note = Description of sequence: CDR3 from table 4
CASSESGRAEAFF

SEQ ID NO: 2049 - protein, 14 aa, synthetic construct
  REGION 1..14: note = Description of sequence: CDR3 from table 4
CASSPDVGHEKLFF

SEQ ID NO: 2050 - protein, 15 aa, synthetic construct
  REGION 1..15: note = Description of sequence: CDR3 from table 4
CASSPIGGGSNEQFF

SEQ ID NO: 2051 - protein, 15 aa, synthetic construct
  REGION 1..15: note = Description of sequence: CDR3 from table 4
CASGFTFQGSPEAFF

SEQ ID NO: 2052 - protein, 15 aa, synthetic construct
  REGION 1..15: note = Description of sequence: CDR3 from table 4
CASSFGGLARNEQFF

SEQ ID NO: 2053 - protein, 15 aa, synthetic construct
  REGION 1..15: note = Description of sequence: CDR3 from table 4
CASSYFGGSLSEQYF

SEQ ID NO: 2054 - protein, 14 aa, synthetic construct
  REGION 1..14: note = Description of sequence: CDR3 from table 4
CASSFLTGTGELFF

SEQ ID NO: 2055 - protein, 14 aa, synthetic construct
  REGION 1..14: note = Description of sequence: CDR3 from table 4
CASRPQGLGNTIYF

SEQ ID NO: 2056 - protein, 15 aa, synthetic construct
  REGION 1..15: note = Description of sequence: CDR3 from table 4
CASSYFRGSLSEQYF

SEQ ID NO: 2057 - protein, 12 aa, synthetic construct
  REGION 1..12: note = Description of sequence: CDR3 from table 4
CASSPGGTEAFF

SEQ ID NO: 2058 - protein, 14 aa, synthetic construct
  REGION 1..14: note = Description of sequence: CDR3 from table 4
CASSFGGGGQPQHF

SEQ ID NO: 2059 - protein, 13 aa, synthetic construct
  REGION 1..13: note = Description of sequence: CDR3 from table 4
CASSLGVGTEAFF

SEQ ID NO: 2060 - protein, 17 aa, synthetic construct
  REGION 1..17: note = Description of sequence: CDR3 from table 4
CASSFGRNRSQNTEAFF

SEQ ID NO: 2061 - protein, 15 aa, synthetic construct
  REGION 1..15: note = Description of sequence: CDR3 from table 4
CASSYRQDSNQPQHF

SEQ ID NO: 2062 - protein, 9 aa, synthetic construct
  REGION 1..9: note = Description of sequence: Wildtype peptide from Table 5
FLTYLDVSV

SEQ ID NO: 2063 - protein, 9 aa, synthetic construct
  REGION 1..9: note = Description of sequence: Wildtype peptide from Table 5
SMPDFDLHL

SEQ ID NO: 2064 - protein, 10 aa, synthetic construct
  REGION 1..10: note = Description of sequence: Wildtype peptide from Table 5
VLLGVKLSGV

SEQ ID NO: 2065 - protein, 9 aa, synthetic construct
  REGION 1..9: note = Description of sequence: Wildtype peptide from Table 5
ALIHHNTHL

SEQ ID NO: 2066 - protein, 10 aa, synthetic construct
  REGION 1..10: note = Description of sequence: Wildtype peptide from Table 5
VLENFTILLV

SEQ ID NO: 2067 - protein, 10 aa, synthetic construct
  REGION 1..10: note = Description of sequence: Wildtype peptide from Table 5
SVLENFTILL

SEQ ID NO: 2068 - protein, 9 aa, synthetic construct
  REGION 1..9: note = Description of sequence: Wildtype peptide from Table 5
ILTGLNYEA

SEQ ID NO: 2069 - protein, 9 aa, synthetic construct
  REGION 1..9: note = Description of sequence: Wildtype peptide from Table 5
ALYGSVPVL

SEQ ID NO: 2070 - protein, 9 aa, synthetic construct
  REGION 1..9: note = Description of sequence: Wildtype peptide from Table 5
VVLSWAPPV

SEQ ID NO: 2071 - protein, 10 aa, synthetic construct
  REGION 1..10: note = Description of sequence: Wildtype peptide from Table 5
ALLETLSLLL

SEQ ID NO: 2072 - protein, 9 aa, synthetic construct
  REGION 1..9: note = Description of sequence: Wildtype peptide from Table 5
ALSPVIPLI

SEQ ID NO: 2073 - protein, 10 aa, synthetic construct
  REGION 1..10: note = Description of sequence: Wildtype peptide from Table 5
KLFEFLVHGV

SEQ ID NO: 2074 - protein, 9 aa, synthetic construct
  REGION 1..9: note = Description of sequence: Wildtype peptide from Table 5
NLNRCSVPV

SEQ ID NO: 2075 - protein, 9 aa, synthetic construct
  REGION 1..9: note = Description of sequence: Wildtype peptide from Table 5
LIIPCIHLI

SEQ ID NO: 2076 - protein, 9 aa, synthetic construct
  REGION 1..9: note = Description of sequence: Wildtype peptide from Table 5
LLFGMTPCL

SEQ ID NO: 2077 - protein, 9 aa, synthetic construct
  REGION 1..9: note = Description of sequence: Wildtype peptide from Table 5
KLSHQPVLL

SEQ ID NO: 2078 - protein, 9 aa, synthetic construct
  REGION 1..9: note = Description of sequence: Wildtype peptide from Table 5
AVGSHVYSV

SEQ ID NO: 2079 - protein, 9 aa, synthetic construct
  REGION 1..9: note = Description of sequence: Wildtype peptide from Table 5
FLYNPLTRV

SEQ ID NO: 2080 - protein, 9 aa, synthetic construct
  REGION 1..9: note = Description of sequence: Wildtype peptide from Table 5
KLMNIQQQL

SEQ ID NO: 2081 - protein, 9 aa, synthetic construct
  REGION 1..9: note = Description of sequence: Wildtype peptide from Table 5
MLGERLFPL

SEQ ID NO: 2082 - protein, 9 aa, synthetic construct
  REGION 1..9: note = Description of sequence: Mutant peptide from Table 5
FLIYLDVSV

SEQ ID NO: 2083 - protein, 9 aa, synthetic construct
  REGION 1..9: note = Description of sequence: Mutant peptide from Table 5
FMPDFDLHL

SEQ ID NO: 2084 - protein, 10 aa, synthetic construct
  REGION 1..10: note = Description of sequence: Mutant peptide from Table 5
VLLGVKLFGV

SEQ ID NO: 2085 - protein, 9 aa, synthetic construct
  REGION 1..9: note = Description of sequence: Mutant peptide from Table 5
ALIHHNTYL

SEQ ID NO: 2086 - protein, 10 aa, synthetic construct
  REGION 1..10: note = Description of sequence: Mutant peptide from Table 5
VLENFTIFLV

SEQ ID NO: 2087 - protein, 10 aa, synthetic construct
  REGION 1..10: note = Description of sequence: Mutant peptide from Table 5
SVLENFTIFL

SEQ ID NO: 2088 - protein, 9 aa, synthetic construct
  REGION 1..9: note = Description of sequence: Mutant peptide from Table 5
ILTGLNYEV

SEQ ID NO: 2089 - protein, 9 aa, synthetic construct
  REGION 1..9: note = Description of sequence: Mutant peptide from Table 5
ALYGFVPVL

SEQ ID NO: 2090 - protein, 9 aa, synthetic construct
  REGION 1..9: note = Description of sequence: Mutant peptide from Table 5
VVMSWAPPV

SEQ ID NO: 2091 - protein, 10 aa, synthetic construct
  REGION 1..10: note = Description of sequence: Mutant peptide from Table 5
ALLETPSLLL

SEQ ID NO: 2092 - protein, 9 aa, synthetic construct
  REGION 1..9: note = Description of sequence: Mutant peptide from Table 5
ALSPVIPHI

SEQ ID NO: 2093 - protein, 10 aa, synthetic construct
  REGION 1..10: note = Description of sequence: Mutant peptide from Table 5
KLFEFLVYGV

SEQ ID NO: 2094 - protein, 9 aa, synthetic construct
  REGION 1..9: note = Description of sequence: Mutant peptide from Table 5
NLNCCSVPV

SEQ ID NO: 2095 - protein, 9 aa, synthetic construct
  REGION 1..9: note = Description of sequence: Mutant peptide from Table 5
LIIPFIHLI

SEQ ID NO: 2096 - protein, 9 aa, synthetic construct
  REGION 1..9: note = Description of sequence: Mutant peptide from Table 5
LLFGMPPCL

SEQ ID NO: 2097 - protein, 9 aa, synthetic construct
  REGION 1..9: note = Description of sequence: Mutant peptide from Table 5
KLSHQLVLL

SEQ ID NO: 2098 - protein, 9 aa, synthetic construct
  REGION 1..9: note = Description of sequence: Mutant peptide from Table 5
AVGSYVYSV

SEQ ID NO: 2099 - protein, 9 aa, synthetic construct
  REGION 1..9: note = Description of sequence: Mutant peptide from Table 5
FLYNLLTRV

SEQ ID NO: 2100 - protein, 9 aa, synthetic construct
  REGION 1..9: note = Description of sequence: Mutant peptide from Table 5
KLMNIQQKL

SEQ ID NO: 2101 - protein, 9 aa, synthetic construct
  REGION 1..9: note = Description of sequence: Mutant peptide from Table 5
MLGEQLFPL

SEQ ID NO: 2102 - protein, 15 aa, synthetic construct
  REGION 1..15: note = Description of sequence: CDR from Table 6
CAMRESNTGGFKTIF

SEQ ID NO: 2103 - protein, 11 aa, synthetic construct
  REGION 1..11: note = Description of sequence: CDR from Table 6
CAVYNTDKLIF

SEQ ID NO: 2104 - protein, 10 aa, synthetic construct
  REGION 1..10: note = Description of sequence: CDR from Table 6
GGTSYGKLTF

SEQ ID NO: 2105 - protein, 13 aa, synthetic construct
  REGION 1..13: note = Description of sequence: CDR from Table 6
CAVNGQAGTALIF

SEQ ID NO: 2106 - protein, 10 aa, synthetic construct
  REGION 1..10: note = Description of sequence: CDR from Table 6
CAYTHARLMF

SEQ ID NO: 2107 - protein, 17 aa, synthetic construct
  REGION 1..17: note = Description of sequence: CDR from Table 6
CAGIPDAGGTSYGKLTF

SEQ ID NO: 2108 - protein, 15 aa, synthetic construct
  REGION 1..15: note = Description of sequence: CDR from Table 6
CAVNKPGFGNEKLTF

SEQ ID NO: 2109 - protein, 13 aa, synthetic construct
  REGION 1..13: note = Description of sequence: CDR from Table 6
CAGRKTSYDKVIF

SEQ ID NO: 2110 - protein, 15 aa, synthetic construct
  REGION 1..15: note = Description of sequence: CDR from Table 6
CAVGATNNAGNMLTF

SEQ ID NO: 2111 - protein, 12 aa, synthetic construct
  REGION 1..12: note = Description of sequence: CDR from Table 6
CAYWEGAQKLVF

SEQ ID NO: 2112 - protein, 14 aa, synthetic construct
  REGION 1..14: note = Description of sequence: CDR from Table 6
CAVNVYNQGGKLIF

SEQ ID NO: 2113 - protein, 14 aa, synthetic construct
  REGION 1..14: note = Description of sequence: CDR from Table 6
CAMSVSDTGNQFYF

SEQ ID NO: 2114 - protein, 16 aa, synthetic construct
  REGION 1..16: note = Description of sequence: CDR from Table 6
CAVGAGSNFGNEKLTF

SEQ ID NO: 2115 - protein, 12 aa, synthetic construct
  REGION 1..12: note = Description of sequence: CDR from Table 6
CAVRNRDDKIIF

SEQ ID NO: 2116 - protein, 15 aa, synthetic construct
  REGION 1..15: note = Description of sequence: CDR from Table 6
CALSEVGAGSYQLTF

SEQ ID NO: 2117 - protein, 13 aa, synthetic construct
  REGION 1..13: note = Description of sequence: CDR from Table 6
CAVQAGGYQKVTF

SEQ ID NO: 2118 - protein, 15 aa, synthetic construct
  REGION 1..15: note = Description of sequence: CDR from Table 6
CAMREGNTGGFKTIF

SEQ ID NO: 2119 - protein, 10 aa, synthetic construct
  REGION 1..10: note = Description of sequence: CDR from Table 6
CAYGANDMRF

SEQ ID NO: 2120 - protein, 16 aa, synthetic construct
  REGION 1..16: note = Description of sequence: CDR from Table 6
CAASATGGTSYGKLTF

SEQ ID NO: 2121 - protein, 11 aa, synthetic construct
  REGION 1..11: note = Description of sequence: CDR from Table 6
CAMHRDDKIIF

SEQ ID NO: 2122 - protein, 13 aa, synthetic construct
  REGION 1..13: note = Description of sequence: CDR from Table 6
CASGIQGAQKLVF

SEQ ID NO: 2123 - protein, 11 aa, synthetic construct
  REGION 1..11: note = Description of sequence: CDR from Table 6
CALSGYSTLTF

SEQ ID NO: 2124 - protein, 13 aa, synthetic construct
  REGION 1..13: note = Description of sequence: CDR from Table 6
CAVSKEGSYIPTF

SEQ ID NO: 2125 - protein, 13 aa, synthetic construct
  REGION 1..13: note = Description of sequence: CDR from Table 6
CAFMIDNNNDMRF

SEQ ID NO: 2126 - protein, 12 aa, synthetic construct
  REGION 1..12: note = Description of sequence: CDR from Table 6
CAVNAWNNDMRF

SEQ ID NO: 2127 - protein, 15 aa, synthetic construct
  REGION 1..15: note = Description of sequence: CDR from Table 6
CAVGGEAQGAQKLVF

SEQ ID NO: 2128 - protein, 13 aa, synthetic construct
  REGION 1..13: note = Description of sequence: CDR from Table 6
CAVSGAGSYQLTF

SEQ ID NO: 2129 - protein, 16 aa, synthetic construct
  REGION 1..16: note = Description of sequence: CDR from Table 6
CALSEAMTSGTYKYIF

SEQ ID NO: 2130 - protein, 16 aa, synthetic construct
  REGION 1..16: note = Description of sequence: CDR from Table 6
CAVSNLMDTGRRALTF

SEQ ID NO: 2131 - protein, 10 aa, synthetic construct
  REGION 1..10: note = Description of sequence: CDR from Table 6
CALSEHDMRF

SEQ ID NO: 2132 - protein, 13 aa, synthetic construct
  REGION 1..13: note = Description of sequence: CDR from Table 6
CATDADTGNQFYF

SEQ ID NO: 2133 - protein, 13 aa, synthetic construct
  REGION 1..13: note = Description of sequence: CDR from Table 6
CALNTGTASKLTF

SEQ ID NO: 2134 - protein, 14 aa, synthetic construct
  REGION 1..14: note = Description of sequence: CDR from Table 6
CAYYGGGATNKLIF

SEQ ID NO: 2135 - protein, 15 aa, synthetic construct
  REGION 1..15: note = Description of sequence: CDR from Table 6
CAMSLRSYTGNQFYF

SEQ ID NO: 2136 - protein, 13 aa, synthetic construct
  REGION 1..13: note = Description of sequence: CDR from Table 6
CAAKDNYGQNFVF

SEQ ID NO: 2137 - protein, 15 aa, synthetic construct
  REGION 1..15: note = Description of sequence: CDR from Table 6
CAASLRYFGNEKLTF

SEQ ID NO: 2138 - protein, 13 aa, synthetic construct
  REGION 1..13: note = Description of sequence: CDR from Table 6
CAVTDYNTDKLIF

SEQ ID NO: 2139 - protein, 12 aa, synthetic construct
  REGION 1..12: note = Description of sequence: CDR from Table 6
CAYVEGNYQLIW

SEQ ID NO: 2140 - protein, 16 aa, synthetic construct
  REGION 1..16: note = Description of sequence: CDR from Table 6
CALSEVRYSSASKIIF

SEQ ID NO: 2141 - protein, 15 aa, synthetic construct
  REGION 1..15: note = Description of sequence: CDR from Table 6
CALRGRVAGANNLFF

SEQ ID NO: 2142 - protein, 14 aa, synthetic construct
  REGION 1..14: note = Description of sequence: CDR from Table 6
CAVAFNNAGNMLTF

SEQ ID NO: 2143 - protein, 16 aa, synthetic construct
  REGION 1..16: note = Description of sequence: CDR from Table 6
CVVSGVNVWGTYKYIF

SEQ ID NO: 2144 - protein, 13 aa, synthetic construct
  REGION 1..13: note = Description of sequence: CDR from Table 6
CAFPMDSNYQLIW

SEQ ID NO: 2145 - protein, 10 aa, synthetic construct
  REGION 1..10: note = Description of sequence: CDR from Table 6
CAPGGEKLTF

SEQ ID NO: 2146 - protein, 12 aa, synthetic construct
  REGION 1..12: note = Description of sequence: CDR from Table 6
CSVGGGSEKLVF

SEQ ID NO: 2147 - protein, 13 aa, synthetic construct
  REGION 1..13: note = Description of sequence: CDR from Table 6
CAGLNSDGQKLLF

SEQ ID NO: 2148 - protein, 14 aa, synthetic construct
  REGION 1..14: note = Description of sequence: CDR from Table 6
CAVNSKSGYSTLTF

SEQ ID NO: 2149 - protein, 14 aa, synthetic construct
  REGION 1..14: note = Description of sequence: CDR from Table 6
CAVSMDTGRRALTF

SEQ ID NO: 2150 - protein, 12 aa, synthetic construct
  REGION 1..12: note = Description of sequence: CDR from Table 6
CAMREGGNDMRF

SEQ ID NO: 2151 - protein, 14 aa, synthetic construct
  REGION 1..14: note = Description of sequence: CDR from Table 6
CAVRDKNRDDKIIF

SEQ ID NO: 2152 - protein, 14 aa, synthetic construct
  REGION 1..14: note = Description of sequence: CDR from Table 6
CAEKGAGGSYIPTF

SEQ ID NO: 2153 - protein, 15 aa, synthetic construct
  REGION 1..15: note = Description of sequence: CDR from Table 6
CAMREVREAGNQFYF

SEQ ID NO: 2154 - protein, 11 aa, synthetic construct
  REGION 1..11: note = Description of sequence: CDR from Table 6
CAYLDDYKLSF

SEQ ID NO: 2155 - protein, 14 aa, synthetic construct
  REGION 1..14: note = Description of sequence: CDR from Table 6
CAVRLDDFGNVLHC

SEQ ID NO: 2156 - protein, 16 aa, synthetic construct
  REGION 1..16: note = Description of sequence: CDR from Table 6
CAMREGPSQAGTALIF

SEQ ID NO: 2157 - protein, 13 aa, synthetic construct
  REGION 1..13: note = Description of sequence: CDR from Table 6
CALYGGSQGNLIF

SEQ ID NO: 2158 - protein, 13 aa, synthetic construct
  REGION 1..13: note = Description of sequence: CDR from Table 6
CAMRGSDGQKLLF

SEQ ID NO: 2159 - protein, 17 aa, synthetic construct
  REGION 1..17: note = Description of sequence: CDR from Table 6
CAMREPYSGAGSYQLTF

SEQ ID NO: 2160 - protein, 10 aa, synthetic construct
  REGION 1..10: note = Description of sequence: CDR from Table 6
CAYFELDMRF

SEQ ID NO: 2161 - protein, 10 aa, synthetic construct
  REGION 1..10: note = Description of sequence: CDR from Table 6
CAYSTGDMRF

SEQ ID NO: 2162 - protein, 14 aa, synthetic construct
  REGION 1..14: note = Description of sequence: CDR from Table 6
CVVSPYNQGGKLIF

SEQ ID NO: 2163 - protein, 12 aa, synthetic construct
  REGION 1..12: note = Description of sequence: CDR from Table 6
CAESRGTDKLIF

SEQ ID NO: 2164 - protein, 12 aa, synthetic construct
  REGION 1..12: note = Description of sequence: CDR from Table 6
CALQTGANNLFF

SEQ ID NO: 2165 - protein, 12 aa, synthetic construct
  REGION 1..12: note = Description of sequence: CDR from Table 6
CAEYSSASKIIF

SEQ ID NO: 2166 - protein, 13 aa, synthetic construct
  REGION 1..13: note = Description of sequence: CDR from Table 6
CAVLNSGNTPLVF

SEQ ID NO: 2167 - protein, 14 aa, synthetic construct
  REGION 1..14: note = Description of sequence: CDR from Table 6
CAGNYGGSQGNLIF

SEQ ID NO: 2168 - protein, 16 aa, synthetic construct
  REGION 1..16: note = Description of sequence: CDR from Table 6
CILRDALIQAGNMLTF

SEQ ID NO: 2169 - protein, 16 aa, synthetic construct
  REGION 1..16: note = Description of sequence: CDR from Table 6
CAVNLNYGGSQGNLIF

SEQ ID NO: 2170 - protein, 14 aa, synthetic construct
  REGION 1..14: note = Description of sequence: CDR from Table 6
CAVNPVQGAQKLVF

SEQ ID NO: 2171 - protein, 15 aa, synthetic construct
  REGION 1..15: note = Description of sequence: CDR from Table 6
CAASAGLAGSYQLTF

SEQ ID NO: 2172 - protein, 7 aa, synthetic construct
  REGION 1..7: note = Description of sequence: CDR from Table 6
CAASEAF

SEQ ID NO: 2173 - protein, 13 aa, synthetic construct
  REGION 1..13: note = Description of sequence: CDR from Table 6
CAVRESYGQNFVF

SEQ ID NO: 2174 - protein, 11 aa, synthetic construct
  REGION 1..11: note = Description of sequence: CDR from Table 6
CAVRGYSTLTF

SEQ ID NO: 2175 - protein, 12 aa, synthetic construct
  REGION 1..12: note = Description of sequence: CDR from Table 6
CAVVTTTDKLIF

SEQ ID NO: 2176 - protein, 13 aa, synthetic construct
  REGION 1..13: note = Description of sequence: CDR from Table 6
CAVMDDSWGKLQF

SEQ ID NO: 2177 - protein, 15 aa, synthetic construct
  REGION 1..15: note = Description of sequence: CDR from Table 6
CAVSNSGGSNYKLTF

SEQ ID NO: 2178 - protein, 15 aa, synthetic construct
  REGION 1..15: note = Description of sequence: CDR from Table 6
CAETGQGGGADGLTF

SEQ ID NO: 2179 - protein, 13 aa, synthetic construct
  REGION 1..13: note = Description of sequence: CDR from Table 6
CAVRDMDNARLMF

SEQ ID NO: 2180 - protein, 13 aa, synthetic construct
  REGION 1..13: note = Description of sequence: CDR from Table 6
CAVRDQAGTALIF

SEQ ID NO: 2181 - protein, 13 aa, synthetic construct
  REGION 1..13: note = Description of sequence: CDR from Table 6
CAETGDSNYQLIW

SEQ ID NO: 2182 - protein, 12 aa, synthetic construct
  REGION 1..12: note = Description of sequence: CDR from Table 6
CAVRTSYDKVIF

SEQ ID NO: 2183 - protein, 15 aa, synthetic construct
  REGION 1..15: note = Description of sequence: CDR from Table 6
CAMSATASGTYKYIF

SEQ ID NO: 2184 - protein, 15 aa, synthetic construct
  REGION 1..15: note = Description of sequence: CDR from Table 6
CVVNQRGGGADGLTF

SEQ ID NO: 2185 - protein, 14 aa, synthetic construct
  REGION 1..14: note = Description of sequence: CDR from Table 6
CALSEAENDYKLSF

SEQ ID NO: 2186 - protein, 16 aa, synthetic construct
  REGION 1..16: note = Description of sequence: CDR from Table 6
CAESLRPGGGADGLTF

SEQ ID NO: 2187 - protein, 16 aa, synthetic construct
  REGION 1..16: note = Description of sequence: CDR from Table 6
CAVQASSGAGSYQLTF

SEQ ID NO: 2188 - protein, 13 aa, synthetic construct
  REGION 1..13: note = Description of sequence: CDR from Table 6
CAVGGGSQGNLIF

SEQ ID NO: 2189 - protein, 15 aa, synthetic construct
  REGION 1..15: note = Description of sequence: CDR from Table 6
CALRDSSGGSYIPTF

SEQ ID NO: 2190 - protein, 12 aa, synthetic construct
  REGION 1..12: note = Description of sequence: CDR from Table 6
CVTGTNAGKSTF

SEQ ID NO: 2191 - protein, 16 aa, synthetic construct
  REGION 1..16: note = Description of sequence: CDR from Table 6
CALSDSVNNAGNMLTF

SEQ ID NO: 2192 - protein, 16 aa, synthetic construct
  REGION 1..16: note = Description of sequence: CDR from Table 6
CIVRGDIKAAGNKLTF

SEQ ID NO: 2193 - protein, 14 aa, synthetic construct
  REGION 1..14: note = Description of sequence: CDR from Table 6
CALADMNRDDKIIF

SEQ ID NO: 2194 - protein, 13 aa, synthetic construct
  REGION 1..13: note = Description of sequence: CDR from Table 6
CAVKGGGSYIPTF

SEQ ID NO: 2195 - protein, 16 aa, synthetic construct
  REGION 1..16: note = Description of sequence: CDR from Table 6
CAIHRGPGAGSYQLTF

SEQ ID NO: 2196 - protein, 14 aa, synthetic construct
  REGION 1..14: note = Description of sequence: CDR from Table 6
CAMREPDSNYQLIW

SEQ ID NO: 2197 - protein, 12 aa, synthetic construct
  REGION 1..12: note = Description of sequence: CDR from Table 6
CAVYSSASKIIF

SEQ ID NO: 2198 - protein, 14 aa, synthetic construct
  REGION 1..14: note = Description of sequence: CDR from Table 6
CALRENYNNNDMRF

SEQ ID NO: 2199 - protein, 12 aa, synthetic construct
  REGION 1..12: note = Description of sequence: CDR from Table 6
CAVKTSYDKVIF

SEQ ID NO: 2200 - protein, 15 aa, synthetic construct
  REGION 1..15: note = Description of sequence: CDR from Table 6
CVVTTTGGGYNKLIF

SEQ ID NO: 2201 - protein, 13 aa, synthetic construct
  REGION 1..13: note = Description of sequence: CDR from Table 6
CAATPTNAGKSTF

SEQ ID NO: 2202 - protein, 14 aa, synthetic construct
  REGION 1..14: note = Description of sequence: CDR from Table 6
CAGHNNNAGNMLTF

SEQ ID NO: 2203 - protein, 13 aa, synthetic construct
  REGION 1..13: note = Description of sequence: CDR from Table 6
CASGEYYGQNFVF

SEQ ID NO: 2204 - protein, 13 aa, synthetic construct
  REGION 1..13: note = Description of sequence: CDR from Table 6
CAVGGYNFNKFYF

SEQ ID NO: 2205 - protein, 15 aa, synthetic construct
  REGION 1..15: note = Description of sequence: CDR from Table 6
CALSEADTGGFKTIF

SEQ ID NO: 2206 - protein, 13 aa, synthetic construct
  REGION 1..13: note = Description of sequence: CDR from Table 6
CAGTGAGSYQLTF

SEQ ID NO: 2207 - protein, 15 aa, synthetic construct
  REGION 1..15: note = Description of sequence: CDR from Table 6
CAVRDMQDSNYQLIW

SEQ ID NO: 2208 - protein, 15 aa, synthetic construct
  REGION 1..15: note = Description of sequence: CDR from Table 6
CAMRANSGGYQKVTF

SEQ ID NO: 2209 - protein, 15 aa, synthetic construct
  REGION 1..15: note = Description of sequence: CDR from Table 6
CAVRDRAGGYQKVTF

SEQ ID NO: 2210 - protein, 11 aa, synthetic construct
  REGION 1..11: note = Description of sequence: CDR from Table 6
CVVSLDYIPTF

SEQ ID NO: 2211 - protein, 11 aa, synthetic construct
  REGION 1..11: note = Description of sequence: CDR from Table 6
CAEKNTDKLIF

SEQ ID NO: 2212 - protein, 16 aa, synthetic construct
  REGION 1..16: note = Description of sequence: CDR from Table 6
CAVAVWGNNAGNMLTF

SEQ ID NO: 2213 - protein, 13 aa, synthetic construct
  REGION 1..13: note = Description of sequence: CDR from Table 6
CVVSNSGNTPLVF

SEQ ID NO: 2214 - protein, 14 aa, synthetic construct
  REGION 1..14: note = Description of sequence: CDR from Table 6
CALSEANDGQKLLF

SEQ ID NO: 2215 - protein, 14 aa, synthetic construct
  REGION 1..14: note = Description of sequence: CDR from Table 6
CAVSLYNQGGKLIF

SEQ ID NO: 2216 - protein, 12 aa, synthetic construct
  REGION 1..12: note = Description of sequence: CDR from Table 6
CAVETSYDKVIF

SEQ ID NO: 2217 - protein, 16 aa, synthetic construct
  REGION 1..16: note = Description of sequence: CDR from Table 6
CAMREPSQGGSEKLVF

SEQ ID NO: 2218 - protein, 13 aa, synthetic construct
  REGION 1..13: note = Description of sequence: CDR from Table 6
CASAGTSYDKVIF

SEQ ID NO: 2219 - protein, 14 aa, synthetic construct
  REGION 1..14: note = Description of sequence: CDR from Table 6
CAESSSGSARQLTF

SEQ ID NO: 2220 - protein, 16 aa, synthetic construct
  REGION 1..16: note = Description of sequence: CDR from Table 6
CAASAQGGTSYGKLTF

SEQ ID NO: 2221 - protein, 12 aa, synthetic construct
  REGION 1..12: note = Description of sequence: CDR from Table 6
CAVFYGNNRLAF

SEQ ID NO: 2222 - protein, 15 aa, synthetic construct
  REGION 1..15: note = Description of sequence: CDR from Table 6
CALSEVITGANNLFF

SEQ ID NO: 2223 - protein, 16 aa, synthetic construct
  REGION 1..16: note = Description of sequence: CDR from Table 6
CAVRDWYGGSQGNLIF

SEQ ID NO: 2224 - protein, 9 aa, synthetic construct
  REGION 1..9: note = Description of sequence: CDR from Table 6
CAGADKLIF

SEQ ID NO: 2225 - protein, 17 aa, synthetic construct
  REGION 1..17: note = Description of sequence: CDR from Table 6
CAESSFYVSGGYNKLIF

SEQ ID NO: 2226 - protein, 17 aa, synthetic construct
  REGION 1..17: note = Description of sequence: CDR from Table 6
CVVSDKEWGGGADGLTF

SEQ ID NO: 2227 - protein, 11 aa, synthetic construct
  REGION 1..11: note = Description of sequence: CDR from Table 6
CAAPRNDKIIF

SEQ ID NO: 2228 - protein, 16 aa, synthetic construct
  REGION 1..16: note = Description of sequence: CDR from Table 6
CALGELVTGGGNKLTF

SEQ ID NO: 2229 - protein, 10 aa, synthetic construct
  REGION 1..10: note = Description of sequence: CDR from Table 6
CAVISNQFYF

SEQ ID NO: 2230 - protein, 12 aa, synthetic construct
  REGION 1..12: note = Description of sequence: CDR from Table 6
PNYGGSQGNLIF

SEQ ID NO: 2231 - protein, 12 aa, synthetic construct
  REGION 1..12: note = Description of sequence: CDR from Table 6
CAVNPRDDKIIF

SEQ ID NO: 2232 - protein, 14 aa, synthetic construct
  REGION 1..14: note = Description of sequence: CDR from Table 6
CAVKDRGGSEKLVF

SEQ ID NO: 2233 - protein, 11 aa, synthetic construct
  REGION 1..11: note = Description of sequence: CDR from Table 6
CAASNDQKLVF

SEQ ID NO: 2234 - protein, 14 aa, synthetic construct
  REGION 1..14: note = Description of sequence: CDR from Table 6
CAAFSNQAGTALIF

SEQ ID NO: 2235 - protein, 15 aa, synthetic construct
  REGION 1..15: note = Description of sequence: CDR from Table 6
CAVGFDNNAGNMLTF

SEQ ID NO: 2236 - protein, 14 aa, synthetic construct
  REGION 1..14: note = Description of sequence: CDR from Table 6
CGTRGGSGNTPLVF

SEQ ID NO: 2237 - protein, 11 aa, synthetic construct
  REGION 1..11: note = Description of sequence: CDR from Table 6
CAVANDYKLSF

SEQ ID NO: 2238 - protein, 14 aa, synthetic construct
  REGION 1..14: note = Description of sequence: CDR from Table 6
CALLTEDSNYQLIW

SEQ ID NO: 2239 - protein, 13 aa, synthetic construct
  REGION 1..13: note = Description of sequence: CDR from Table 6
CAVIPDSNYQLIW

SEQ ID NO: 2240 - protein, 9 aa, synthetic construct
  REGION 1..9: note = Description of sequence: CDR from Table 6
CAYYTPLVF

SEQ ID NO: 2241 - protein, 13 aa, synthetic construct
  REGION 1..13: note = Description of sequence: CDR from Table 6
CAVDPNTGNQFYF

SEQ ID NO: 2242 - protein, 11 aa, synthetic construct
  REGION 1..11: note = Description of sequence: CDR from Table 6
CAVNTGNQFYF

SEQ ID NO: 2243 - protein, 12 aa, synthetic construct
  REGION 1..12: note = Description of sequence: CDR from Table 6
CAVLLYGNKLVF

SEQ ID NO: 2244 - protein, 13 aa, synthetic construct
  REGION 1..13: note = Description of sequence: CDR from Table 6
CALTQGGSEKLVF

SEQ ID NO: 2245 - protein, 13 aa, synthetic construct
  REGION 1..13: note = Description of sequence: CDR from Table 6
CAVTTDSWGKLQF

SEQ ID NO: 2246 - protein, 12 aa, synthetic construct
  REGION 1..12: note = Description of sequence: CDR from Table 6
CIVRVDNARLMF

SEQ ID NO: 2247 - protein, 17 aa, synthetic construct
  REGION 1..17: note = Description of sequence: CDR from Table 6
CAMREDAGGTSYGKLTF

SEQ ID NO: 2248 - protein, 14 aa, synthetic construct
  REGION 1..14: note = Description of sequence: CDR from Table 6
CAVGNSGGYQKVTF

SEQ ID NO: 2249 - protein, 11 aa, synthetic construct
  REGION 1..11: note = Description of sequence: CDR from Table 6
CAFSDGQKLLF

SEQ ID NO: 2250 - protein, 13 aa, synthetic construct
  REGION 1..13: note = Description of sequence: CDR from Table 6
CAVKMDSNYQLIW

SEQ ID NO: 2251 - protein, 12 aa, synthetic construct
  REGION 1..12: note = Description of sequence: CDR from Table 6
CAVTGSGYALNF

SEQ ID NO: 2252 - protein, 12 aa, synthetic construct
  REGION 1..12: note = Description of sequence: CDR from Table 6
CAATSNTGKLIF

SEQ ID NO: 2253 - protein, 12 aa, synthetic construct
  REGION 1..12: note = Description of sequence: CDR from Table 6
CVGMDSSYKLIF

SEQ ID NO: 2254 - protein, 14 aa, synthetic construct
  REGION 1..14: note = Description of sequence: CDR from Table 6
CAVRYYFGNEKLTF

SEQ ID NO: 2255 - protein, 13 aa, synthetic construct
  REGION 1..13: note = Description of sequence: CDR from Table 6
CAASGGGADGLTF

SEQ ID NO: 2256 - protein, 15 aa, synthetic construct
  REGION 1..15: note = Description of sequence: CDR from Table 6
CAVIPRGGSNYKLTF

SEQ ID NO: 2257 - protein, 12 aa, synthetic construct
  REGION 1..12: note = Description of sequence: CDR from Table 6
CAYGGGTYKYIF

SEQ ID NO: 2258 - protein, 12 aa, synthetic construct
  REGION 1..12: note = Description of sequence: CDR from Table 6
CAVMTGGFKTIF

SEQ ID NO: 2259 - protein, 14 aa, synthetic construct
  REGION 1..14: note = Description of sequence: CDR from Table 6
CALTQSGGYQKVTF

SEQ ID NO: 2260 - protein, 10 aa, synthetic construct
  REGION 1..10: note = Description of sequence: CDR from Table 6
CALGDYKLSF

SEQ ID NO: 2261 - protein, 12 aa, synthetic construct
  REGION 1..12: note = Description of sequence: CDR from Table 6
CAMIFNDYKLSF

SEQ ID NO: 2262 - protein, 16 aa, synthetic construct
  REGION 1..16: note = Description of sequence: CDR from Table 6
CAVSDLNSGGYQKVTF

SEQ ID NO: 2263 - protein, 10 aa, synthetic construct
  REGION 1..10: note = Description of sequence: CDR from Table 6
CAVNNARLMF

SEQ ID NO: 2264 - protein, 10 aa, synthetic construct
  REGION 1..10: note = Description of sequence: CDR from Table 6
CAIEGGKLIF

SEQ ID NO: 2265 - protein, 13 aa, synthetic construct
  REGION 1..13: note = Description of sequence: CDR from Table 6
CAMKDFGNEKLTF

SEQ ID NO: 2266 - protein, 11 aa, synthetic construct
  REGION 1..11: note = Description of sequence: CDR from Table 6
CAVITGTALIF

SEQ ID NO: 2267 - protein, 18 aa, synthetic construct
  REGION 1..18: note = Description of sequence: CDR from Table 6
CAMREFNAGGTSYGKLTF

SEQ ID NO: 2268 - protein, 19 aa, synthetic construct
  REGION 1..19: note = Description of sequence: CDR from Table 6
CAMRETWGGLGGSQGNLIF

SEQ ID NO: 2269 - protein, 12 aa, synthetic construct
  REGION 1..12: note = Description of sequence: CDR from Table 6
CAVYTGGFKTIF

SEQ ID NO: 2270 - protein, 15 aa, synthetic construct
  REGION 1..15: note = Description of sequence: CDR from Table 6
CAVPVLGGSQGNLIF

SEQ ID NO: 2271 - protein, 13 aa, synthetic construct
  REGION 1..13: note = Description of sequence: CDR from Table 6
CATDANTGNQFYF

SEQ ID NO: 2272 - protein, 14 aa, synthetic construct
  REGION 1..14: note = Description of sequence: CDR from Table 6
CALLSNQAGTALIF

SEQ ID NO: 2273 - protein, 15 aa, synthetic construct
  REGION 1..15: note = Description of sequence: CDR from Table 6
CAVGDAGGATNKLIF

SEQ ID NO: 2274 - protein, 15 aa, synthetic construct
  REGION 1..15: note = Description of sequence: CDR from Table 6
CALSEPIYNFNKFYF

SEQ ID NO: 2275 - protein, 14 aa, synthetic construct
  REGION 1..14: note = Description of sequence: CDR from Table 6
CAVEDLGFGNVLHC

SEQ ID NO: 2276 - protein, 12 aa, synthetic construct
  REGION 1..12: note = Description of sequence: CDR from Table 6
CAVNPGGFKTIF

SEQ ID NO: 2277 - protein, 12 aa, synthetic construct
  REGION 1..12: note = Description of sequence: CDR from Table 6
CAVSPGGFKTIF

SEQ ID NO: 2278 - protein, 13 aa, synthetic construct
  REGION 1..13: note = Description of sequence: CDR from Table 6
CAERDQAGTALIF

SEQ ID NO: 2279 - protein, 12 aa, synthetic construct
  REGION 1..12: note = Description of sequence: CDR from Table 6
CAVGYNTDKLIF

SEQ ID NO: 2280 - protein, 12 aa, synthetic construct
  REGION 1..12: note = Description of sequence: CDR from Table 6
CAVRGSARQLTF

SEQ ID NO: 2281 - protein, 14 aa, synthetic construct
  REGION 1..14: note = Description of sequence: CDR from Table 6
CAMDKMDSNYQLIW

SEQ ID NO: 2282 - protein, 15 aa, synthetic construct
  REGION 1..15: note = Description of sequence: CDR from Table 6
CAMRESKAAGNKLTF

SEQ ID NO: 2283 - protein, 14 aa, synthetic construct
  REGION 1..14: note = Description of sequence: CDR from Table 6
CAASLNTNAGKSTF

SEQ ID NO: 2284 - protein, 15 aa, synthetic construct
  REGION 1..15: note = Description of sequence: CDR from Table 6
CAMRESSYGNNRLAF

SEQ ID NO: 2285 - protein, 15 aa, synthetic construct
  REGION 1..15: note = Description of sequence: CDR from Table 6
CAVNMEGAGSYQLTF

SEQ ID NO: 2286 - protein, 12 aa, synthetic construct
  REGION 1..12: note = Description of sequence: CDR from Table 6
CAENKDDYKLSF

SEQ ID NO: 2287 - protein, 16 aa, synthetic construct
  REGION 1..16: note = Description of sequence: CDR from Table 6
CAGAEISGGGADGLTF

SEQ ID NO: 2288 - protein, 17 aa, synthetic construct
  REGION 1..17: note = Description of sequence: CDR from Table 6
CAMREFYSGGGADGLTF

SEQ ID NO: 2289 - protein, 13 aa, synthetic construct
  REGION 1..13: note = Description of sequence: CDR from Table 6
RINSGGSNYKLTF

SEQ ID NO: 2290 - protein, 13 aa, synthetic construct
  REGION 1..13: note = Description of sequence: CDR from Table 6
CAVVMEYGNKLVF

SEQ ID NO: 2291 - protein, 15 aa, synthetic construct
  REGION 1..15: note = Description of sequence: CDR from Table 6
CATASLRNYGQNFVF

SEQ ID NO: 2292 - protein, 17 aa, synthetic construct
  REGION 1..17: note = Description of sequence: CDR from Table 6
CIVRVDERGTSYGKLTF

SEQ ID NO: 2293 - protein, 13 aa, synthetic construct
  REGION 1..13: note = Description of sequence: CDR from Table 6
CAVGAEYGNKLVF

SEQ ID NO: 2294 - protein, 16 aa, synthetic construct
  REGION 1..16: note = Description of sequence: CDR from Table 6
CAVTWGHNNAGNMLTF

SEQ ID NO: 2295 - protein, 14 aa, synthetic construct
  REGION 1..14: note = Description of sequence: CDR from Table 6
CALLLGGGADGLTF

SEQ ID NO: 2296 - protein, 14 aa, synthetic construct
  REGION 1..14: note = Description of sequence: CDR from Table 6
CAMIGNSGNTPLVF

SEQ ID NO: 2297 - protein, 15 aa, synthetic construct
  REGION 1..15: note = Description of sequence: CDR from Table 6
CAENRNAGNNRKLIW

SEQ ID NO: 2298 - protein, 14 aa, synthetic construct
  REGION 1..14: note = Description of sequence: CDR from Table 6
CALSNAGNNRKLIW

SEQ ID NO: 2299 - protein, 14 aa, synthetic construct
  REGION 1..14: note = Description of sequence: CDR from Table 6
CAVRDTGGGNKLTF

SEQ ID NO: 2300 - protein, 14 aa, synthetic construct
  REGION 1..14: note = Description of sequence: CDR from Table 6
CVALRGGSQGNLIF

SEQ ID NO: 2301 - protein, 14 aa, synthetic construct
  REGION 1..14: note = Description of sequence: CDR from Table 6
CAEIGNTGGFKTIF

SEQ ID NO: 2302 - protein, 12 aa, synthetic construct
  REGION 1..12: note = Description of sequence: CDR from Table 6
CAVNRDDYKLSF

SEQ ID NO: 2303 - protein, 13 aa, synthetic construct
  REGION 1..13: note = Description of sequence: CDR from Table 6
CAVLTDSWGKLQF

SEQ ID NO: 2304 - protein, 13 aa, synthetic construct
  REGION 1..13: note = Description of sequence: CDR from Table 6
CAGDGGSQGNLIF

SEQ ID NO: 2305 - protein, 13 aa, synthetic construct
  REGION 1..13: note = Description of sequence: CDR from Table 6
CVVNPYNTDKLIF

SEQ ID NO: 2306 - protein, 16 aa, synthetic construct
  REGION 1..16: note = Description of sequence: CDR from Table 6
CAGQMYSGGGADGLTF

SEQ ID NO: 2307 - protein, 14 aa, synthetic construct
  REGION 1..14: note = Description of sequence: CDR from Table 6
CIVRVRDSNYQLIW

SEQ ID NO: 2308 - protein, 14 aa, synthetic construct
  REGION 1..14: note = Description of sequence: CDR from Table 6
CAAFSHTNAGKSTF

SEQ ID NO: 2309 - protein, 14 aa, synthetic construct
  REGION 1..14: note = Description of sequence: CDR from Table 6
CVVISTDSWGKFQF

SEQ ID NO: 2310 - protein, 12 aa, synthetic construct
  REGION 1..12: note = Description of sequence: CDR from Table 6
CATDVYDYKLSF

SEQ ID NO: 2311 - protein, 14 aa, synthetic construct
  REGION 1..14: note = Description of sequence: CDR from Table 6
CAPPIEGGSEKLVF

SEQ ID NO: 2312 - protein, 13 aa, synthetic construct
  REGION 1..13: note = Description of sequence: CDR from Table 6
CSVPEGNTGELFF

SEQ ID NO: 2313 - protein, 11 aa, synthetic construct
  REGION 1..11: note = Description of sequence: CDR from Table 6
CASSLEGEQYF

SEQ ID NO: 2314 - protein, 12 aa, synthetic construct
  REGION 1..12: note = Description of sequence: CDR from Table 6
CASSQGALGYTF

SEQ ID NO: 2315 - protein, 17 aa, synthetic construct
  REGION 1..17: note = Description of sequence: CDR from Table 6
CASSFPDRGQGVYGYTF

SEQ ID NO: 2316 - protein, 15 aa, synthetic construct
  REGION 1..15: note = Description of sequence: CDR from Table 6
CASYFFALFTDTQYF

SEQ ID NO: 2317 - protein, 14 aa, synthetic construct
  REGION 1..14: note = Description of sequence: CDR from Table 6
CSARLKGGGDTQYF

SEQ ID NO: 2318 - protein, 13 aa, synthetic construct
  REGION 1..13: note = Description of sequence: CDR from Table 6
CATSRDRGTDTFF

SEQ ID NO: 2319 - protein, 17 aa, synthetic construct
  REGION 1..17: note = Description of sequence: CDR from Table 6
CASSYSSDFWGDQPQHF

SEQ ID NO: 2320 - protein, 17 aa, synthetic construct
  REGION 1..17: note = Description of sequence: CDR from Table 6
CASSGAAGTSAYNEQFF

SEQ ID NO: 2321 - protein, 17 aa, synthetic construct
  REGION 1..17: note = Description of sequence: CDR from Table 6
CASSYASTGTLNYGYTF

SEQ ID NO: 2322 - protein, 14 aa, synthetic construct
  REGION 1..14: note = Description of sequence: CDR from Table 6
CASSPDLNPYEQYF

SEQ ID NO: 2323 - protein, 14 aa, synthetic construct
  REGION 1..14: note = Description of sequence: CDR from Table 6
CASSSQGETYEQYF

SEQ ID NO: 2324 - protein, 14 aa, synthetic construct
  REGION 1..14: note = Description of sequence: CDR from Table 6
CATAKEGLAYEQFF

SEQ ID NO: 2325 - protein, 18 aa, synthetic construct
  REGION 1..18: note = Description of sequence: CDR from Table 6
CASSSGLAGGPKHYEQYF

SEQ ID NO: 2326 - protein, 14 aa, synthetic construct
  REGION 1..14: note = Description of sequence: CDR from Table 6
CATSRDRGLTEAFF

SEQ ID NO: 2327 - protein, 13 aa, synthetic construct
  REGION 1..13: note = Description of sequence: CDR from Table 6
CASSYGGNSPLHF

SEQ ID NO: 2328 - protein, 13 aa, synthetic construct
  REGION 1..13: note = Description of sequence: CDR from Table 6
CSADVGGQNEQYF

SEQ ID NO: 2329 - protein, 13 aa, synthetic construct
  REGION 1..13: note = Description of sequence: CDR from Table 6
CASSVGTGYEQYF

SEQ ID NO: 2330 - protein, 15 aa, synthetic construct
  REGION 1..15: note = Description of sequence: CDR from Table 6
CASSLSSRSNQPQHF

SEQ ID NO: 2331 - protein, 15 aa, synthetic construct
  REGION 1..15: note = Description of sequence: CDR from Table 6
CASSSRQGAGDTQYF

SEQ ID NO: 2332 - protein, 13 aa, synthetic construct
  REGION 1..13: note = Description of sequence: CDR from Table 6
CASSAGGDTEAFF

SEQ ID NO: 2333 - protein, 13 aa, synthetic construct
  REGION 1..13: note = Description of sequence: CDR from Table 6
CASSDGGKDGYTF

SEQ ID NO: 2334 - protein, 16 aa, synthetic construct
  REGION 1..16: note = Description of sequence: CDR from Table 6
CASSLWRGMGAGELFF

SEQ ID NO: 2335 - protein, 15 aa, synthetic construct
  REGION 1..15: note = Description of sequence: CDR from Table 6
CASSFTSGSGHEQYF

SEQ ID NO: 2336 - protein, 17 aa, synthetic construct
  REGION 1..17: note = Description of sequence: CDR from Table 6
CASSLAVQRPSGNTIYF

SEQ ID NO: 2337 - protein, 14 aa, synthetic construct
  REGION 1..14: note = Description of sequence: CDR from Table 6
CASSLSGVAYGYTF

SEQ ID NO: 2338 - protein, 13 aa, synthetic construct
  REGION 1..13: note = Description of sequence: CDR from Table 6
CASSQGQGSSQYF

SEQ ID NO: 2339 - protein, 14 aa, synthetic construct
  REGION 1..14: note = Description of sequence: CDR from Table 6
CSVRGGGDNSPLHF

SEQ ID NO: 2340 - protein, 18 aa, synthetic construct
  REGION 1..18: note = Description of sequence: CDR from Table 6
CASSGLAGGPFGMETQYF

SEQ ID NO: 2341 - protein, 13 aa, synthetic construct
  REGION 1..13: note = Description of sequence: CDR from Table 6
CASTQGGVDTQYF

SEQ ID NO: 2342 - protein, 13 aa, synthetic construct
  REGION 1..13: note = Description of sequence: CDR from Table 6
CASSWGPGYEQYF

SEQ ID NO: 2343 - protein, 15 aa, synthetic construct
  REGION 1..15: note = Description of sequence: CDR from Table 6
CASSLVDSGLYEQYF

SEQ ID NO: 2344 - protein, 15 aa, synthetic construct
  REGION 1..15: note = Description of sequence: CDR from Table 6
CSAREVRDLYNEQFF

SEQ ID NO: 2345 - protein, 15 aa, synthetic construct
  REGION 1..15: note = Description of sequence: CDR from Table 6
CASSLSSGPYNEQFF

SEQ ID NO: 2346 - protein, 15 aa, synthetic construct
  REGION 1..15: note = Description of sequence: CDR from Table 6
CASSLPGGPRETQYF

SEQ ID NO: 2347 - protein, 12 aa, synthetic construct
  REGION 1..12: note = Description of sequence: CDR from Table 6
CASSFGPYGYTF

SEQ ID NO: 2348 - protein, 15 aa, synthetic construct
  REGION 1..15: note = Description of sequence: CDR from Table 6
CASSLQASGRETQYF

SEQ ID NO: 2349 - protein, 12 aa, synthetic construct
  REGION 1..12: note = Description of sequence: CDR from Table 6
CASSLGSGTQYF

SEQ ID NO: 2350 - protein, 15 aa, synthetic construct
  REGION 1..15: note = Description of sequence: CDR from Table 6
CSARISTSSSYEQYF

SEQ ID NO: 2351 - protein, 16 aa, synthetic construct
  REGION 1..16: note = Description of sequence: CDR from Table 6
CASSLYGGESQETQYF

SEQ ID NO: 2352 - protein, 12 aa, synthetic construct
  REGION 1..12: note = Description of sequence: CDR from Table 6
CASSPDPYEQYF

SEQ ID NO: 2353 - protein, 11 aa, synthetic construct
  REGION 1..11: note = Description of sequence: CDR from Table 6
CASSFRGEAFF

SEQ ID NO: 2354 - protein, 13 aa, synthetic construct
  REGION 1..13: note = Description of sequence: CDR from Table 6
CASSIAAGNTIYF

SEQ ID NO: 2355 - protein, 15 aa, synthetic construct
  REGION 1..15: note = Description of sequence: CDR from Table 6
CASSLHREVNEKLFF

SEQ ID NO: 2356 - protein, 13 aa, synthetic construct
  REGION 1..13: note = Description of sequence: CDR from Table 6
CASSEWAGQPQHF

SEQ ID NO: 2357 - protein, 12 aa, synthetic construct
  REGION 1..12: note = Description of sequence: CDR from Table 6
CASSGGGAEAFF

SEQ ID NO: 2358 - protein, 17 aa, synthetic construct
  REGION 1..17: note = Description of sequence: CDR from Table 6
CASSIESGSKQRNEQFF

SEQ ID NO: 2359 - protein, 13 aa, synthetic construct
  REGION 1..13: note = Description of sequence: CDR from Table 6
CATREPPNTEAFF

SEQ ID NO: 2360 - protein, 14 aa, synthetic construct
  REGION 1..14: note = Description of sequence: CDR from Table 6
CASSYNSMNTEAFF

SEQ ID NO: 2361 - protein, 13 aa, synthetic construct
  REGION 1..13: note = Description of sequence: CDR from Table 6
CASSLGGPAEQYF

SEQ ID NO: 2362 - protein, 12 aa, synthetic construct
  REGION 1..12: note = Description of sequence: CDR from Table 6
CASSFGGYEQYF

SEQ ID NO: 2363 - protein, 14 aa, synthetic construct
  REGION 1..14: note = Description of sequence: CDR from Table 6
CASSSSGIGETQYF

SEQ ID NO: 2364 - protein, 16 aa, synthetic construct
  REGION 1..16: note = Description of sequence: CDR from Table 6
CASSYSSDRSSYEQYF

SEQ ID NO: 2365 - protein, 14 aa, synthetic construct
  REGION 1..14: note = Description of sequence: CDR from Table 6
CASKSWDMAYEQYF

SEQ ID NO: 2366 - protein, 18 aa, synthetic construct
  REGION 1..18: note = Description of sequence: CDR from Table 6
CASSSGTSLTLTYNEQFF

SEQ ID NO: 2367 - protein, 16 aa, synthetic construct
  REGION 1..16: note = Description of sequence: CDR from Table 6
CASSPRIGGPREGYTF

SEQ ID NO: 2368 - protein, 14 aa, synthetic construct
  REGION 1..14: note = Description of sequence: CDR from Table 6
CASQPWFNTGELFF

SEQ ID NO: 2369 - protein, 11 aa, synthetic construct
  REGION 1..11: note = Description of sequence: CDR from Table 6
CAISPGGEQFF

SEQ ID NO: 2370 - protein, 12 aa, synthetic construct
  REGION 1..12: note = Description of sequence: CDR from Table 6
CASSYSLAGEFF

SEQ ID NO: 2371 - protein, 12 aa, synthetic construct
  REGION 1..12: note = Description of sequence: CDR from Table 6
CASGKGDTEAFF

SEQ ID NO: 2372 - protein, 14 aa, synthetic construct
  REGION 1..14: note = Description of sequence: CDR from Table 6
CASSVETTDYGYTF

SEQ ID NO: 2373 - protein, 16 aa, synthetic construct
  REGION 1..16: note = Description of sequence: CDR from Table 6
CASSFAPGQGIEKLFF

SEQ ID NO: 2374 - protein, 14 aa, synthetic construct
  REGION 1..14: note = Description of sequence: CDR from Table 6
CASSEVSVLYEQYF

SEQ ID NO: 2375 - protein, 15 aa, synthetic construct
  REGION 1..15: note = Description of sequence: CDR from Table 6
CASSVETGGLDTQYF

SEQ ID NO: 2376 - protein, 13 aa, synthetic construct
  REGION 1..13: note = Description of sequence: CDR from Table 6
CASSRGGGTEAFF

SEQ ID NO: 2377 - protein, 12 aa, synthetic construct
  REGION 1..12: note = Description of sequence: CDR from Table 6
CASGAQHTEAFF

SEQ ID NO: 2378 - protein, 13 aa, synthetic construct
  REGION 1..13: note = Description of sequence: CDR from Table 6
CASSFEGQETQYF

SEQ ID NO: 2379 - protein, 12 aa, synthetic construct
  REGION 1..12: note = Description of sequence: CDR from Table 6
CAISELGYEQYF

SEQ ID NO: 2380 - protein, 12 aa, synthetic construct
  REGION 1..12: note = Description of sequence: CDR from Table 6
CSATSEYTEAFF

SEQ ID NO: 2381 - protein, 13 aa, synthetic construct
  REGION 1..13: note = Description of sequence: CDR from Table 6
CAISSDRTDEQYF

SEQ ID NO: 2382 - protein, 14 aa, synthetic construct
  REGION 1..14: note = Description of sequence: CDR from Table 6
CASSLDIGDQPQHF

SEQ ID NO: 2383 - protein, 11 aa, synthetic construct
  REGION 1..11: note = Description of sequence: CDR from Table 6
CASSFMETQYF

SEQ ID NO: 2384 - protein, 13 aa, synthetic construct
  REGION 1..13: note = Description of sequence: CDR from Table 6
CASSLWAGETQYF

SEQ ID NO: 2385 - protein, 12 aa, synthetic construct
  REGION 1..12: note = Description of sequence: CDR from Table 6
CASSLDYNEQFF

SEQ ID NO: 2386 - protein, 11 aa, synthetic construct
  REGION 1..11: note = Description of sequence: CDR from Table 6
CASSPGRTQYF

SEQ ID NO: 2387 - protein, 14 aa, synthetic construct
  REGION 1..14: note = Description of sequence: CDR from Table 6
CASSMAAGTHEQYF

SEQ ID NO: 2388 - protein, 15 aa, synthetic construct
  REGION 1..15: note = Description of sequence: CDR from Table 6
CSARTDRGNNYGYTF

SEQ ID NO: 2389 - protein, 13 aa, synthetic construct
  REGION 1..13: note = Description of sequence: CDR from Table 6
CASSANQGYEQYF

SEQ ID NO: 2390 - protein, 12 aa, synthetic construct
  REGION 1..12: note = Description of sequence: CDR from Table 6
CASSEWGIEAFF

SEQ ID NO: 2391 - protein, 13 aa, synthetic construct
  REGION 1..13: note = Description of sequence: CDR from Table 6
CASSQVEGYEQYF

SEQ ID NO: 2392 - protein, 18 aa, synthetic construct
  REGION 1..18: note = Description of sequence: CDR from Table 6
CASSEISSGGPFLDTQYF

SEQ ID NO: 2393 - protein, 15 aa, synthetic construct
  REGION 1..15: note = Description of sequence: CDR from Table 6
CASSYSSRVNYEQYF

SEQ ID NO: 2394 - protein, 15 aa, synthetic construct
  REGION 1..15: note = Description of sequence: CDR from Table 6
CASSSGLAGNSTQYF

SEQ ID NO: 2395 - protein, 11 aa, synthetic construct
  REGION 1..11: note = Description of sequence: CDR from Table 6
CASTTGLEAFF

SEQ ID NO: 2396 - protein, 15 aa, synthetic construct
  REGION 1..15: note = Description of sequence: CDR from Table 6
CSARDLGGGGDEQFF

SEQ ID NO: 2397 - protein, 14 aa, synthetic construct
  REGION 1..14: note = Description of sequence: CDR from Table 6
CASSLATGGGEQYF

SEQ ID NO: 2398 - protein, 14 aa, synthetic construct
  REGION 1..14: note = Description of sequence: CDR from Table 6
CASSYGGISYGYTF

SEQ ID NO: 2399 - protein, 14 aa, synthetic construct
  REGION 1..14: note = Description of sequence: CDR from Table 6
CASSYASGGYEQYF

SEQ ID NO: 2400 - protein, 15 aa, synthetic construct
  REGION 1..15: note = Description of sequence: CDR from Table 6
CASSVGGDIGIGYTF

SEQ ID NO: 2401 - protein, 12 aa, synthetic construct
  REGION 1..12: note = Description of sequence: CDR from Table 6
CASSFGPVEQYF

SEQ ID NO: 2402 - protein, 13 aa, synthetic construct
  REGION 1..13: note = Description of sequence: CDR from Table 6
CATSEGLQYEQYF

SEQ ID NO: 2403 - protein, 14 aa, synthetic construct
  REGION 1..14: note = Description of sequence: CDR from Table 6
CSVTQGDGTDTQYF

SEQ ID NO: 2404 - protein, 17 aa, synthetic construct
  REGION 1..17: note = Description of sequence: CDR from Table 6
CASSVEGAHPIQETQYF

SEQ ID NO: 2405 - protein, 16 aa, synthetic construct
  REGION 1..16: note = Description of sequence: CDR from Table 6
CASSLGQTVTQETQYF

SEQ ID NO: 2406 - protein, 17 aa, synthetic construct
  REGION 1..17: note = Description of sequence: CDR from Table 6
CASSQDLTASYYNEQFF

SEQ ID NO: 2407 - protein, 15 aa, synthetic construct
  REGION 1..15: note = Description of sequence: CDR from Table 6
CASSVAAGGAYEQYF

SEQ ID NO: 2408 - protein, 12 aa, synthetic construct
  REGION 1..12: note = Description of sequence: CDR from Table 6
CASRGPYNEQFF

SEQ ID NO: 2409 - protein, 11 aa, synthetic construct
  REGION 1..11: note = Description of sequence: CDR from Table 6
CASSLATEQFF

SEQ ID NO: 2410 - protein, 15 aa, synthetic construct
  REGION 1..15: note = Description of sequence: CDR from Table 6
CASSLESTANTEAFF

SEQ ID NO: 2411 - protein, 13 aa, synthetic construct
  REGION 1..13: note = Description of sequence: CDR from Table 6
CASNPGPTYGYTF

SEQ ID NO: 2412 - protein, 15 aa, synthetic construct
  REGION 1..15: note = Description of sequence: CDR from Table 6
CAIMSSGRADGELFF

SEQ ID NO: 2413 - protein, 12 aa, synthetic construct
  REGION 1..12: note = Description of sequence: CDR from Table 6
CASSQGSDEQYF

SEQ ID NO: 2414 - protein, 13 aa, synthetic construct
  REGION 1..13: note = Description of sequence: CDR from Table 6
CASSYGGAYEQYF

SEQ ID NO: 2415 - protein, 15 aa, synthetic construct
  REGION 1..15: note = Description of sequence: CDR from Table 6
CASSVDPGQSYEQYF

SEQ ID NO: 2416 - protein, 13 aa, synthetic construct
  REGION 1..13: note = Description of sequence: CDR from Table 6
CASSIVDGYEQYF

SEQ ID NO: 2417 - protein, 12 aa, synthetic construct
  REGION 1..12: note = Description of sequence: CDR from Table 6
CASSGFRGELFF

SEQ ID NO: 2418 - protein, 13 aa, synthetic construct
  REGION 1..13: note = Description of sequence: CDR from Table 6
CASSYGQGYEQYF

SEQ ID NO: 2419 - protein, 16 aa, synthetic construct
  REGION 1..16: note = Description of sequence: CDR from Table 6
CASSQVGGSYPREQFF

SEQ ID NO: 2420 - protein, 12 aa, synthetic construct
  REGION 1..12: note = Description of sequence: CDR from Table 6
CASSRGGHEQYF

SEQ ID NO: 2421 - protein, 13 aa, synthetic construct
  REGION 1..13: note = Description of sequence: CDR from Table 6
CASSDPNDYEQYF

SEQ ID NO: 2422 - protein, 14 aa, synthetic construct
  REGION 1..14: note = Description of sequence: CDR from Table 6
CASSIVGQGYEQYF

SEQ ID NO: 2423 - protein, 14 aa, synthetic construct
  REGION 1..14: note = Description of sequence: CDR from Table 6
CASSMGGVGTEAFF

SEQ ID NO: 2424 - protein, 13 aa, synthetic construct
  REGION 1..13: note = Description of sequence: CDR from Table 6
CASSPYSNQPQHF

SEQ ID NO: 2425 - protein, 14 aa, synthetic construct
  REGION 1..14: note = Description of sequence: CDR from Table 6
CASSFRDSSYEQYF

SEQ ID NO: 2426 - protein, 18 aa, synthetic construct
  REGION 1..18: note = Description of sequence: CDR from Table 6
CASSYSVKGQDYSYEQYF

SEQ ID NO: 2427 - protein, 16 aa, synthetic construct
  REGION 1..16: note = Description of sequence: CDR from Table 6
CASRLHGGTPSYEQYF

SEQ ID NO: 2428 - protein, 13 aa, synthetic construct
  REGION 1..13: note = Description of sequence: CDR from Table 6
CASSVEGSTEAFF

SEQ ID NO: 2429 - protein, 13 aa, synthetic construct
  REGION 1..13: note = Description of sequence: CDR from Table 6
CASSQAGGYEQYF

SEQ ID NO: 2430 - protein, 15 aa, synthetic construct
  REGION 1..15: note = Description of sequence: CDR from Table 6
CASTQPVDMNTEAFF

SEQ ID NO: 2431 - protein, 14 aa, synthetic construct
  REGION 1..14: note = Description of sequence: CDR from Table 6
CASSLYRGGDTQYF

SEQ ID NO: 2432 - protein, 14 aa, synthetic construct
  REGION 1..14: note = Description of sequence: CDR from Table 6
CASSSRLSQETQYF

SEQ ID NO: 2433 - protein, 14 aa, synthetic construct
  REGION 1..14: note = Description of sequence: CDR from Table 6
CASSVEGSGETQYF

SEQ ID NO: 2434 - protein, 14 aa, synthetic construct
  REGION 1..14: note = Description of sequence: CDR from Table 6
CASSVSQGGYEQYF

SEQ ID NO: 2435 - protein, 14 aa, synthetic construct
  REGION 1..14: note = Description of sequence: CDR from Table 6
CSAPGGSGANVLTF

SEQ ID NO: 2436 - protein, 16 aa, synthetic construct
  REGION 1..16: note = Description of sequence: CDR from Table 6
CASSNVLAGGRDTQYF

SEQ ID NO: 2437 - protein, 15 aa, synthetic construct
  REGION 1..15: note = Description of sequence: CDR from Table 6
CASSLGDRGPQPQHF

SEQ ID NO: 2438 - protein, 14 aa, synthetic construct
  REGION 1..14: note = Description of sequence: CDR from Table 6
CASTLAGGPYEQYF

SEQ ID NO: 2439 - protein, 13 aa, synthetic construct
  REGION 1..13: note = Description of sequence: CDR from Table 6
CASTGTDSYEQYF

SEQ ID NO: 2440 - protein, 11 aa, synthetic construct
  REGION 1..11: note = Description of sequence: CDR from Table 6
CASSNQETQYF

SEQ ID NO: 2441 - protein, 13 aa, synthetic construct
  REGION 1..13: note = Description of sequence: CDR from Table 6
CSVRTPSSYEQYF

SEQ ID NO: 2442 - protein, 14 aa, synthetic construct
  REGION 1..14: note = Description of sequence: CDR from Table 6
CASSQVPGGYEQYF

SEQ ID NO: 2443 - protein, 16 aa, synthetic construct
  REGION 1..16: note = Description of sequence: CDR from Table 6
CASRMGTSGSTDTQYF

SEQ ID NO: 2444 - protein, 16 aa, synthetic construct
  REGION 1..16: note = Description of sequence: CDR from Table 6
CSALGLAGGQGGELFF

SEQ ID NO: 2445 - protein, 10 aa, synthetic construct
  REGION 1..10: note = Description of sequence: CDR from Table 6
CSAGVYEQYF

SEQ ID NO: 2446 - protein, 15 aa, synthetic construct
  REGION 1..15: note = Description of sequence: CDR from Table 6
CASSVWDSLTGELFF

SEQ ID NO: 2447 - protein, 12 aa, synthetic construct
  REGION 1..12: note = Description of sequence: CDR from Table 6
CASSWDNGGYTF

SEQ ID NO: 2448 - protein, 13 aa, synthetic construct
  REGION 1..13: note = Description of sequence: CDR from Table 6
CASSVGSQETQYF

SEQ ID NO: 2449 - protein, 15 aa, synthetic construct
  REGION 1..15: note = Description of sequence: CDR from Table 6
CASILGLTTYNEQFF

SEQ ID NO: 2450 - protein, 14 aa, synthetic construct
  REGION 1..14: note = Description of sequence: CDR from Table 6
CASSWTGAGYEQYF

SEQ ID NO: 2451 - protein, 11 aa, synthetic construct
  REGION 1..11: note = Description of sequence: CDR from Table 6
CASSLGETQYF

SEQ ID NO: 2452 - protein, 14 aa, synthetic construct
  REGION 1..14: note = Description of sequence: CDR from Table 6
CASRYREGVEKLFF

SEQ ID NO: 2453 - protein, 15 aa, synthetic construct
  REGION 1..15: note = Description of sequence: CDR from Table 6
CASSYSGPTGYEQYF

SEQ ID NO: 2454 - protein, 15 aa, synthetic construct
  REGION 1..15: note = Description of sequence: CDR from Table 6
CASSLNREGNTEAFF

SEQ ID NO: 2455 - protein, 15 aa, synthetic construct
  REGION 1..15: note = Description of sequence: CDR from Table 6
CASSYEGALSYEQYF

SEQ ID NO: 2456 - protein, 14 aa, synthetic construct
  REGION 1..14: note = Description of sequence: CDR from Table 6
CSAREGLAAGELFF

SEQ ID NO: 2457 - protein, 15 aa, synthetic construct
  REGION 1..15: note = Description of sequence: CDR from Table 6
CASSPGQGLAYEQYF

SEQ ID NO: 2458 - protein, 13 aa, synthetic construct
  REGION 1..13: note = Description of sequence: CDR from Table 6
CASRDSLTGELFF

SEQ ID NO: 2459 - protein, 14 aa, synthetic construct
  REGION 1..14: note = Description of sequence: CDR from Table 6
CASSPSGGSYGYTF

SEQ ID NO: 2460 - protein, 14 aa, synthetic construct
  REGION 1..14: note = Description of sequence: CDR from Table 6
CASSISTSGYEQFF

SEQ ID NO: 2461 - protein, 14 aa, synthetic construct
  REGION 1..14: note = Description of sequence: CDR from Table 6
CASSYSNGGYGYTF

SEQ ID NO: 2462 - protein, 14 aa, synthetic construct
  REGION 1..14: note = Description of sequence: CDR from Table 6
CASSFWTSGGEQYF

SEQ ID NO: 2463 - protein, 15 aa, synthetic construct
  REGION 1..15: note = Description of sequence: CDR from Table 6
CAISERWDGYNEQFF

SEQ ID NO: 2464 - protein, 12 aa, synthetic construct
  REGION 1..12: note = Description of sequence: CDR from Table 6
CASSFLGDEQFF

SEQ ID NO: 2465 - protein, 15 aa, synthetic construct
  REGION 1..15: note = Description of sequence: CDR from Table 6
CATSRDLGGQQPQHF

SEQ ID NO: 2466 - protein, 13 aa, synthetic construct
  REGION 1..13: note = Description of sequence: CDR from Table 6
CASSVGEGTEAFF

SEQ ID NO: 2467 - protein, 14 aa, synthetic construct
  REGION 1..14: note = Description of sequence: CDR from Table 6
CASTATFGVTEAFF

SEQ ID NO: 2468 - protein, 13 aa, synthetic construct
  REGION 1..13: note = Description of sequence: CDR from Table 6
CASSYSLAAEAFF

SEQ ID NO: 2469 - protein, 12 aa, synthetic construct
  REGION 1..12: note = Description of sequence: CDR from Table 6
CASSLTGSEQYF

SEQ ID NO: 2470 - protein, 13 aa, synthetic construct
  REGION 1..13: note = Description of sequence: CDR from Table 6
CASSGELGSPLHF

SEQ ID NO: 2471 - protein, 11 aa, synthetic construct
  REGION 1..11: note = Description of sequence: CDR from Table 6
CASSSLGEQFF

SEQ ID NO: 2472 - protein, 11 aa, synthetic construct
  REGION 1..11: note = Description of sequence: CDR from Table 6
CASTDTGELFF

SEQ ID NO: 2473 - protein, 17 aa, synthetic construct
  REGION 1..17: note = Description of sequence: CDR from Table 6
CSVEGPGGRIANTEAFF

SEQ ID NO: 2474 - protein, 13 aa, synthetic construct
  REGION 1..13: note = Description of sequence: CDR from Table 6
CASSARGYDEQFF

SEQ ID NO: 2475 - protein, 13 aa, synthetic construct
  REGION 1..13: note = Description of sequence: CDR from Table 6
CSARASGAYEQYF

SEQ ID NO: 2476 - protein, 13 aa, synthetic construct
  REGION 1..13: note = Description of sequence: CDR from Table 6
CASSYANGYEQYF

SEQ ID NO: 2477 - protein, 13 aa, synthetic construct
  REGION 1..13: note = Description of sequence: CDR from Table 6
CASSWGGGYEQYF

SEQ ID NO: 2478 - protein, 12 aa, synthetic construct
  REGION 1..12: note = Description of sequence: CDR from Table 6
CASNQGLYEQYF

SEQ ID NO: 2479 - protein, 15 aa, synthetic construct
  REGION 1..15: note = Description of sequence: CDR from Table 6
CASSIAQGGNQPQHF

SEQ ID NO: 2480 - protein, 14 aa, synthetic construct
  REGION 1..14: note = Description of sequence: CDR from Table 6
CASSRQPMNTEAFF

SEQ ID NO: 2481 - protein, 12 aa, synthetic construct
  REGION 1..12: note = Description of sequence: CDR from Table 6
CASSYSLEGYTF

SEQ ID NO: 2482 - protein, 14 aa, synthetic construct
  REGION 1..14: note = Description of sequence: CDR from Table 6
CSARVTSGSYEQYF

SEQ ID NO: 2483 - protein, 13 aa, synthetic construct
  REGION 1..13: note = Description of sequence: CDR from Table 6
CSVGTYSNQPQHF

SEQ ID NO: 2484 - protein, 13 aa, synthetic construct
  REGION 1..13: note = Description of sequence: CDR from Table 6
CASSEGGYTEAFF

SEQ ID NO: 2485 - protein, 13 aa, synthetic construct
  REGION 1..13: note = Description of sequence: CDR from Table 6
CASSPGDGTEAFF

SEQ ID NO: 2486 - protein, 16 aa, synthetic construct
  REGION 1..16: note = Description of sequence: CDR from Table 6
CASSLPPADMRDTQYF

SEQ ID NO: 2487 - protein, 9 aa, synthetic construct
  REGION 1..9: note = Description of sequence: CDR from Table 6
CSSVTEAFF

SEQ ID NO: 2488 - protein, 13 aa, synthetic construct
  REGION 1..13: note = Description of sequence: CDR from Table 6
CASSQDRGNEQFF

SEQ ID NO: 2489 - protein, 12 aa, synthetic construct
  REGION 1..12: note = Description of sequence: CDR from Table 6
CASSFGSGEQFF

SEQ ID NO: 2490 - protein, 13 aa, synthetic construct
  REGION 1..13: note = Description of sequence: CDR from Table 6
CASSQAHTGELFF

SEQ ID NO: 2491 - protein, 16 aa, synthetic construct
  REGION 1..16: note = Description of sequence: CDR from Table 6
CASSQDRDSGYYEQYF

SEQ ID NO: 2492 - protein, 13 aa, synthetic construct
  REGION 1..13: note = Description of sequence: CDR from Table 6
CASSYSSGYFLFF

SEQ ID NO: 2493 - protein, 13 aa, synthetic construct
  REGION 1..13: note = Description of sequence: CDR from Table 6
CASSPSTGYGYTF

SEQ ID NO: 2494 - protein, 12 aa, synthetic construct
  REGION 1..12: note = Description of sequence: CDR from Table 6
CASSTGNYGYTF

SEQ ID NO: 2495 - protein, 15 aa, synthetic construct
  REGION 1..15: note = Description of sequence: CDR from Table 6
CASSLIQGAVDTQYF

SEQ ID NO: 2496 - protein, 13 aa, synthetic construct
  REGION 1..13: note = Description of sequence: CDR from Table 6
CASSFGQGYEQYF

SEQ ID NO: 2497 - protein, 13 aa, synthetic construct
  REGION 1..13: note = Description of sequence: CDR from Table 6
CASSPWTLNEQYF

SEQ ID NO: 2498 - protein, 13 aa, synthetic construct
  REGION 1..13: note = Description of sequence: CDR from Table 6
CASSYGNTGELFF

SEQ ID NO: 2499 - protein, 15 aa, synthetic construct
  REGION 1..15: note = Description of sequence: CDR from Table 6
CASSYSDRSSYEQYF

SEQ ID NO: 2500 - protein, 13 aa, synthetic construct
  REGION 1..13: note = Description of sequence: CDR from Table 6
CASSYGGGYEQYF

SEQ ID NO: 2501 - protein, 14 aa, synthetic construct
  REGION 1..14: note = Description of sequence: CDR from Table 6
CASREGLEDTEAFF

SEQ ID NO: 2502 - protein, 13 aa, synthetic construct
  REGION 1..13: note = Description of sequence: CDR from Table 6
CASTEGQGGEQYF

SEQ ID NO: 2503 - protein, 9 aa, synthetic construct
  REGION 1..9: note = Description of sequence: CDR from Table 6
CSPGDGYTF

SEQ ID NO: 2504 - protein, 14 aa, synthetic construct
  REGION 1..14: note = Description of sequence: CDR from Table 6
CASSPRDRVHEQYF

SEQ ID NO: 2505 - protein, 15 aa, synthetic construct
  REGION 1..15: note = Description of sequence: CDR from Table 6
CASSQGGGGTDTQYF

SEQ ID NO: 2506 - protein, 13 aa, synthetic construct
  REGION 1..13: note = Description of sequence: CDR from Table 6
CASSPSPGSEQYF

SEQ ID NO: 2507 - protein, 13 aa, synthetic construct
  REGION 1..13: note = Description of sequence: CDR from Table 6
CASSDWGGETQYF

SEQ ID NO: 2508 - protein, 11 aa, synthetic construct
  REGION 1..11: note = Description of sequence: CDR from Table 6
CSWDFQETQYF

SEQ ID NO: 2509 - protein, 12 aa, synthetic construct
  REGION 1..12: note = Description of sequence: CDR from Table 6
CASSENTGELFF

SEQ ID NO: 2510 - protein, 14 aa, synthetic construct
  REGION 1..14: note = Description of sequence: CDR from Table 6
CSGLVPGFDSPLHF

SEQ ID NO: 2511 - protein, 15 aa, synthetic construct
  REGION 1..15: note = Description of sequence: CDR from Table 6
CASSVDGGPQETQYF

SEQ ID NO: 2512 - protein, 14 aa, synthetic construct
  REGION 1..14: note = Description of sequence: CDR from Table 6
CASSFGGSSYEQYF

SEQ ID NO: 2513 - protein, 14 aa, synthetic construct
  REGION 1..14: note = Description of sequence: CDR from Table 6
CASSVGTSSYGYTF

SEQ ID NO: 2514 - protein, 13 aa, synthetic construct
  REGION 1..13: note = Description of sequence: CDR from Table 6
CASSLGTLNEQFF

SEQ ID NO: 2515 - protein, 13 aa, synthetic construct
  REGION 1..13: note = Description of sequence: CDR from Table 6
CASSNARGYGYTF

SEQ ID NO: 2516 - protein, 13 aa, synthetic construct
  REGION 1..13: note = Description of sequence: CDR from Table 6
CASSWWLNTEAFF

SEQ ID NO: 2517 - protein, 14 aa, synthetic construct
  REGION 1..14: note = Description of sequence: CDR from Table 6
CASSPAGSNYGYTF

SEQ ID NO: 2518 - protein, 11 aa, synthetic construct
  REGION 1..11: note = Description of sequence: CDR from Table 6
CASSLGAEQYF

SEQ ID NO: 2519 - protein, 12 aa, synthetic construct
  REGION 1..12: note = Description of sequence: CDR from Table 6
CASSPGLYTQYF

SEQ ID NO: 2520 - protein, 13 aa, synthetic construct
  REGION 1..13: note = Description of sequence: CDR from Table 6
CASSYSSGTEAFF

SEQ ID NO: 2521 - protein, 13 aa, synthetic construct
  REGION 1..13: note = Description of sequence: CDR from Table 6
CASSLREAGELFF

SEQ ID NO: 2522 - protein, 12 aa, synthetic construct
  REGION 1..12: note = Description of sequence: CDR from Table 6
CASSLGNTEAFF

SEQ ID NO: 2523 - protein, 15 aa, synthetic construct
  REGION 1..15: note = Description of sequence: CDR from Table 6
CASSEVQGGRDTQYF

SEQ ID NO: 2524 - protein, 12 aa, synthetic construct
  REGION 1..12: note = Description of sequence: CDR from Table 6
CASSFGIGPQYF

SEQ ID NO: 2525 - protein, 16 aa, synthetic construct
  REGION 1..16: note = Description of sequence: CDR from Table 6
CASSLWGQGWTGELFF

SEQ ID NO: 2526 - protein, 12 aa, synthetic construct
  REGION 1..12: note = Description of sequence: CDR from Table 6
CAWSVGNYGYTF

SEQ ID NO: 2527 - protein, 13 aa, synthetic construct
  REGION 1..13: note = Description of sequence: CDR from Table 6
CASSRPLNQPQHF

SEQ ID NO: 2528 - protein, 12 aa, synthetic construct
  REGION 1..12: note = Description of sequence: CDR from Table 6
CASSVESGEQYF

SEQ ID NO: 2529 - protein, 13 aa, synthetic construct
  REGION 1..13: note = Description of sequence: CDR from Table 6
CASSFSATGELFF

SEQ ID NO: 2530 - protein, 11 aa, synthetic construct
  REGION 1..11: note = Description of sequence: CDR from Table 6
CASSLAYEQYF

SEQ ID NO: 2531 - protein, 14 aa, synthetic construct
  REGION 1..14: note = Description of sequence: CDR from Table 6
CASSFGANTGELFF

SEQ ID NO: 2532 - protein, 14 aa, synthetic construct
  REGION 1..14: note = Description of sequence: CDR from Table 6
CASSEDRGNSPLHF

SEQ ID NO: 2533 - protein, 13 aa, synthetic construct
  REGION 1..13: note = Description of sequence: CDR from Table 7
CAVGFYGNNRLAF

SEQ ID NO: 2534 - protein, 10 aa, synthetic construct
  REGION 1..10: note = Description of sequence: CDR from Table 7
CAVRNNDMRF

SEQ ID NO: 2535 - protein, 17 aa, synthetic construct
  REGION 1..17: note = Description of sequence: CDR from Table 7
CALSEALAYNQGGKLIF

SEQ ID NO: 2536 - protein, 12 aa, synthetic construct
  REGION 1..12: note = Description of sequence: CDR from Table 7
CVVSGGYNKLIF

SEQ ID NO: 2537 - protein, 14 aa, synthetic construct
  REGION 1..14: note = Description of sequence: CDR from Table 7
CAMRDPFTGNQFYF

SEQ ID NO: 2538 - protein, 11 aa, synthetic construct
  REGION 1..11: note = Description of sequence: CDR from Table 7
CALRGYSTLTF

SEQ ID NO: 2539 - protein, 15 aa, synthetic construct
  REGION 1..15: note = Description of sequence: CDR from Table 7
CAMRELGGSNYKLTF

SEQ ID NO: 2540 - protein, 15 aa, synthetic construct
  REGION 1..15: note = Description of sequence: CDR from Table 7
CALSETDTGRRALTF

SEQ ID NO: 2541 - protein, 15 aa, synthetic construct
  REGION 1..15: note = Description of sequence: CDR from Table 7
CAMREFAGANSKLTF

SEQ ID NO: 2542 - protein, 10 aa, synthetic construct
  REGION 1..10: note = Description of sequence: CDR from Table 7
CAVNNARLMF

SEQ ID NO: 2543 - protein, 16 aa, synthetic construct
  REGION 1..16: note = Description of sequence: CDR from Table 7
CAASGQGGTSYGKLTF

SEQ ID NO: 2544 - protein, 14 aa, synthetic construct
  REGION 1..14: note = Description of sequence: CDR from Table 7
CAASGGNSGYALNF

SEQ ID NO: 2545 - protein, 12 aa, synthetic construct
  REGION 1..12: note = Description of sequence: CDR from Table 7
CVVRGSQGNLIF

SEQ ID NO: 2546 - protein, 15 aa, synthetic construct
  REGION 1..15: note = Description of sequence: CDR from Table 7
CAASALSGANSKLTF

SEQ ID NO: 2547 - protein, 14 aa, synthetic construct
  REGION 1..14: note = Description of sequence: CDR from Table 7
CAVRETNPKGKLIF

SEQ ID NO: 2548 - protein, 14 aa, synthetic construct
  REGION 1..14: note = Description of sequence: CDR from Table 7
CALSEVNRDDKIIF

SEQ ID NO: 2549 - protein, 13 aa, synthetic construct
  REGION 1..13: note = Description of sequence: CDR from Table 7
CAMRELDGQKLLF

SEQ ID NO: 2550 - protein, 17 aa, synthetic construct
  REGION 1..17: note = Description of sequence: CDR from Table 7
CALSEANYGGSQGNLIF

SEQ ID NO: 2551 - protein, 14 aa, synthetic construct
  REGION 1..14: note = Description of sequence: CDR from Table 7
CAVRGLTGANNLFF

SEQ ID NO: 2552 - protein, 13 aa, synthetic construct
  REGION 1..13: note = Description of sequence: CDR from Table 7
CAFMMDNNNDMRF

SEQ ID NO: 2553 - protein, 14 aa, synthetic construct
  REGION 1..14: note = Description of sequence: CDR from Table 7
CVVTPTDSWGKLQF

SEQ ID NO: 2554 - protein, 15 aa, synthetic construct
  REGION 1..15: note = Description of sequence: CDR from Table 7
CALSEGQTGANNLFF

SEQ ID NO: 2555 - protein, 14 aa, synthetic construct
  REGION 1..14: note = Description of sequence: CDR from Table 7
CAESRPEYGNKLVF

SEQ ID NO: 2556 - protein, 16 aa, synthetic construct
  REGION 1..16: note = Description of sequence: CDR from Table 7
CAMRAYSGGGADGLTF

SEQ ID NO: 2557 - protein, 11 aa, synthetic construct
  REGION 1..11: note = Description of sequence: CDR from Table 7
CAPPGAQKLVF

SEQ ID NO: 2558 - protein, 12 aa, synthetic construct
  REGION 1..12: note = Description of sequence: CDR from Table 7
CAMTITGNQFYF

SEQ ID NO: 2559 - protein, 15 aa, synthetic construct
  REGION 1..15: note = Description of sequence: CDR from Table 7
CALSEAGSGNTPLVF

SEQ ID NO: 2560 - protein, 14 aa, synthetic construct
  REGION 1..14: note = Description of sequence: CDR from Table 7
CALIRNSGNTPLVF

SEQ ID NO: 2561 - protein, 13 aa, synthetic construct
  REGION 1..13: note = Description of sequence: CDR from Table 7
CATEDYNTDKLIF

SEQ ID NO: 2562 - protein, 13 aa, synthetic construct
  REGION 1..13: note = Description of sequence: CDR from Table 7
CAMRELNFNKFYF

SEQ ID NO: 2563 - protein, 11 aa, synthetic construct
  REGION 1..11: note = Description of sequence: CDR from Table 7
CAYHDNNDMRF

SEQ ID NO: 2564 - protein, 14 aa, synthetic construct
  REGION 1..14: note = Description of sequence: CDR from Table 7
CAASAMDSSYKLIF

SEQ ID NO: 2565 - protein, 15 aa, synthetic construct
  REGION 1..15: note = Description of sequence: CDR from Table 7
CALSEAEYNFNKFYF

SEQ ID NO: 2566 - protein, 15 aa, synthetic construct
  REGION 1..15: note = Description of sequence: CDR from Table 7
CAGQSRYNRDDKIIF

SEQ ID NO: 2567 - protein, 12 aa, synthetic construct
  REGION 1..12: note = Description of sequence: CDR from Table 7
CAAAAGANNLFF

SEQ ID NO: 2568 - protein, 12 aa, synthetic construct
  REGION 1..12: note = Description of sequence: CDR from Table 7
CAGGSNDYKLSF

SEQ ID NO: 2569 - protein, 14 aa, synthetic construct
  REGION 1..14: note = Description of sequence: CDR from Table 7
CAVSFYNQGGKLIF

SEQ ID NO: 2570 - protein, 13 aa, synthetic construct
  REGION 1..13: note = Description of sequence: CDR from Table 7
CAVNAPDTDKLIF

SEQ ID NO: 2571 - protein, 14 aa, synthetic construct
  REGION 1..14: note = Description of sequence: CDR from Table 7
CAVVNSNSGYALNF

SEQ ID NO: 2572 - protein, 14 aa, synthetic construct
  REGION 1..14: note = Description of sequence: CDR from Table 7
CAVLLNNAGNMLTF

SEQ ID NO: 2573 - protein, 14 aa, synthetic construct
  REGION 1..14: note = Description of sequence: CDR from Table 7
CAVSGGYRDDKIIF

SEQ ID NO: 2574 - protein, 16 aa, synthetic construct
  REGION 1..16: note = Description of sequence: CDR from Table 7
CIVRDWANFGNEKLTF

SEQ ID NO: 2575 - protein, 14 aa, synthetic construct
  REGION 1..14: note = Description of sequence: CDR from Table 7
CILTMGTSYDKVIF

SEQ ID NO: 2576 - protein, 14 aa, synthetic construct
  REGION 1..14: note = Description of sequence: CDR from Table 7
CAVNEATGRRALTF

SEQ ID NO: 2577 - protein, 13 aa, synthetic construct
  REGION 1..13: note = Description of sequence: CDR from Table 7
CAVDPNTGNQFYF

SEQ ID NO: 2578 - protein, 13 aa, synthetic construct
  REGION 1..13: note = Description of sequence: CDR from Table 7
CAADTSGTYKYIF

SEQ ID NO: 2579 - protein, 11 aa, synthetic construct
  REGION 1..11: note = Description of sequence: CDR from Table 7
CAATRDYKLSF

SEQ ID NO: 2580 - protein, 14 aa, synthetic construct
  REGION 1..14: note = Description of sequence: CDR from Table 7
CALAGWEYGNKLVF

SEQ ID NO: 2581 - protein, 14 aa, synthetic construct
  REGION 1..14: note = Description of sequence: CDR from Table 7
CVVNINSGNTPLVF

SEQ ID NO: 2582 - protein, 14 aa, synthetic construct
  REGION 1..14: note = Description of sequence: CDR from Table 7
CAAEGNTGGFKTIF

SEQ ID NO: 2583 - protein, 12 aa, synthetic construct
  REGION 1..12: note = Description of sequence: CDR from Table 7
CAAETSGSRLTF

SEQ ID NO: 2584 - protein, 14 aa, synthetic construct
  REGION 1..14: note = Description of sequence: CDR from Table 7
CAVIDGAGSYQLTF

SEQ ID NO: 2585 - protein, 13 aa, synthetic construct
  REGION 1..13: note = Description of sequence: CDR from Table 7
CAVFSGGYQKVTF

SEQ ID NO: 2586 - protein, 16 aa, synthetic construct
  REGION 1..16: note = Description of sequence: CDR from Table 7
CALRLSSGGSNYKLTF

SEQ ID NO: 2587 - protein, 13 aa, synthetic construct
  REGION 1..13: note = Description of sequence: CDR from Table 7
CAAERGNNARLMF

SEQ ID NO: 2588 - protein, 15 aa, synthetic construct
  REGION 1..15: note = Description of sequence: CDR from Table 7
CAVNPLEGGYNKLIF

SEQ ID NO: 2589 - protein, 13 aa, synthetic construct
  REGION 1..13: note = Description of sequence: CDR from Table 7
CATDRNAPYALNF

SEQ ID NO: 2590 - protein, 12 aa, synthetic construct
  REGION 1..12: note = Description of sequence: CDR from Table 7
CATDEGNTPLVF

SEQ ID NO: 2591 - protein, 14 aa, synthetic construct
  REGION 1..14: note = Description of sequence: CDR from Table 7
CAVDGGEYGNKLVF

SEQ ID NO: 2592 - protein, 13 aa, synthetic construct
  REGION 1..13: note = Description of sequence: CDR from Table 7
CATDDTGGFKTIF

SEQ ID NO: 2593 - protein, 9 aa, synthetic construct
  REGION 1..9: note = Description of sequence: CDR from Table 7
CAYNPDMRF

SEQ ID NO: 2594 - protein, 14 aa, synthetic construct
  REGION 1..14: note = Description of sequence: CDR from Table 7
CVVSLHTGGFKTIF

SEQ ID NO: 2595 - protein, 12 aa, synthetic construct
  REGION 1..12: note = Description of sequence: CDR from Table 7
CAENVTGNQFYF

SEQ ID NO: 2596 - protein, 13 aa, synthetic construct
  REGION 1..13: note = Description of sequence: CDR from Table 7
CASKRGGADGLTF

SEQ ID NO: 2597 - protein, 9 aa, synthetic construct
  REGION 1..9: note = Description of sequence: CDR from Table 7
CAYSPPLVF

SEQ ID NO: 2598 - protein, 13 aa, synthetic construct
  REGION 1..13: note = Description of sequence: CDR from Table 7
CAFAPGNNNDMRF

SEQ ID NO: 2599 - protein, 12 aa, synthetic construct
  REGION 1..12: note = Description of sequence: CDR from Table 7
CAYFPYGQNFVF

SEQ ID NO: 2600 - protein, 14 aa, synthetic construct
  REGION 1..14: note = Description of sequence: CDR from Table 7
CAMRVSDNFNKFYF

SEQ ID NO: 2601 - protein, 15 aa, synthetic construct
  REGION 1..15: note = Description of sequence: CDR from Table 7
CAESPSNFGNEKLTF

SEQ ID NO: 2602 - protein, 14 aa, synthetic construct
  REGION 1..14: note = Description of sequence: CDR from Table 7
CAENPCSNDYKLSF

SEQ ID NO: 2603 - protein, 12 aa, synthetic construct
  REGION 1..12: note = Description of sequence: CDR from Table 7
CAVTSNTGKLIF

SEQ ID NO: 2604 - protein, 15 aa, synthetic construct
  REGION 1..15: note = Description of sequence: CDR from Table 7
CAMREDYSSASKIIF

SEQ ID NO: 2605 - protein, 14 aa, synthetic construct
  REGION 1..14: note = Description of sequence: CDR from Table 7
CAMALGNTGNQFYF

SEQ ID NO: 2606 - protein, 13 aa, synthetic construct
  REGION 1..13: note = Description of sequence: CDR from Table 7
CAASGGGADGLTF

SEQ ID NO: 2607 - protein, 14 aa, synthetic construct
  REGION 1..14: note = Description of sequence: CDR from Table 7
CAGYSGGGADGLTF

SEQ ID NO: 2608 - protein, 10 aa, synthetic construct
  REGION 1..10: note = Description of sequence: CDR from Table 7
CAVNGNQFYF

SEQ ID NO: 2609 - protein, 10 aa, synthetic construct
  REGION 1..10: note = Description of sequence: CDR from Table 7
CEGNNNDMRF

SEQ ID NO: 2610 - protein, 10 aa, synthetic construct
  REGION 1..10: note = Description of sequence: CDR from Table 7
CAVAHARLMF

SEQ ID NO: 2611 - protein, 13 aa, synthetic construct
  REGION 1..13: note = Description of sequence: CDR from Table 7
CAVGVEYGNKLVF

SEQ ID NO: 2612 - protein, 12 aa, synthetic construct
  REGION 1..12: note = Description of sequence: CDR from Table 7
CAFSQYGNKLVF

SEQ ID NO: 2613 - protein, 13 aa, synthetic construct
  REGION 1..13: note = Description of sequence: CDR from Table 7
CAASIDRDDKIIF

SEQ ID NO: 2614 - protein, 15 aa, synthetic construct
  REGION 1..15: note = Description of sequence: CDR from Table 7
CALTTDSNSGYALNF

SEQ ID NO: 2615 - protein, 12 aa, synthetic construct
  REGION 1..12: note = Description of sequence: CDR from Table 7
CATSQMGDTQYF

SEQ ID NO: 2616 - protein, 16 aa, synthetic construct
  REGION 1..16: note = Description of sequence: CDR from Table 7
CASSPFGDMLYNEQFF

SEQ ID NO: 2617 - protein, 12 aa, synthetic construct
  REGION 1..12: note = Description of sequence: CDR from Table 7
CAARPASYEQYF

SEQ ID NO: 2618 - protein, 16 aa, synthetic construct
  REGION 1..16: note = Description of sequence: CDR from Table 7
CASSSSGRASADTQYF

SEQ ID NO: 2619 - protein, 20 aa, synthetic construct
  REGION 1..20: note = Description of sequence: CDR from Table 7
CASSPNARLAGAGGTDTQYF

SEQ ID NO: 2620 - protein, 17 aa, synthetic construct
  REGION 1..17: note = Description of sequence: CDR from Table 7
CASSLAPKTAFSYEQYF

SEQ ID NO: 2621 - protein, 14 aa, synthetic construct
  REGION 1..14: note = Description of sequence: CDR from Table 7
CSARSWTPQETQYF

SEQ ID NO: 2622 - protein, 14 aa, synthetic construct
  REGION 1..14: note = Description of sequence: CDR from Table 7
CSVEGLRGGNEQFF

SEQ ID NO: 2623 - protein, 14 aa, synthetic construct
  REGION 1..14: note = Description of sequence: CDR from Table 7
CASSLGGLTDTQYF

SEQ ID NO: 2624 - protein, 10 aa, synthetic construct
  REGION 1..10: note = Description of sequence: CDR from Table 7
CAWSAGEQYF

SEQ ID NO: 2625 - protein, 13 aa, synthetic construct
  REGION 1..13: note = Description of sequence: CDR from Table 7
CASSYGGGSPQYF

SEQ ID NO: 2626 - protein, 13 aa, synthetic construct
  REGION 1..13: note = Description of sequence: CDR from Table 7
CASSWTGNTEAFF

SEQ ID NO: 2627 - protein, 14 aa, synthetic construct
  REGION 1..14: note = Description of sequence: CDR from Table 7
CASSPLRGPYEQYF

SEQ ID NO: 2628 - protein, 14 aa, synthetic construct
  REGION 1..14: note = Description of sequence: CDR from Table 7
CSATPRYRGYEQYF

SEQ ID NO: 2629 - protein, 14 aa, synthetic construct
  REGION 1..14: note = Description of sequence: CDR from Table 7
CASAGPGRNQPQHF

SEQ ID NO: 2630 - protein, 14 aa, synthetic construct
  REGION 1..14: note = Description of sequence: CDR from Table 7
CASSQGSGANVLTF

SEQ ID NO: 2631 - protein, 15 aa, synthetic construct
  REGION 1..15: note = Description of sequence: CDR from Table 7
CASYPISRASYEQYF

SEQ ID NO: 2632 - protein, 13 aa, synthetic construct
  REGION 1..13: note = Description of sequence: CDR from Table 7
CASSQDQNTEAFF

SEQ ID NO: 2633 - protein, 15 aa, synthetic construct
  REGION 1..15: note = Description of sequence: CDR from Table 7
CASSGQGHPYNEQFF

SEQ ID NO: 2634 - protein, 14 aa, synthetic construct
  REGION 1..14: note = Description of sequence: CDR from Table 7
CASSPMGQSYEQYF

SEQ ID NO: 2635 - protein, 19 aa, synthetic construct
  REGION 1..19: note = Description of sequence: CDR from Table 7
CASSTGGTSGGRNTGELFF

SEQ ID NO: 2636 - protein, 13 aa, synthetic construct
  REGION 1..13: note = Description of sequence: CDR from Table 7
CSARGDPNYEQYF

SEQ ID NO: 2637 - protein, 13 aa, synthetic construct
  REGION 1..13: note = Description of sequence: CDR from Table 7
CASSPRAYNEQFF

SEQ ID NO: 2638 - protein, 13 aa, synthetic construct
  REGION 1..13: note = Description of sequence: CDR from Table 7
CASSGQGGDEQYF

SEQ ID NO: 2639 - protein, 15 aa, synthetic construct
  REGION 1..15: note = Description of sequence: CDR from Table 7
CASSVGGGSSYEQYF

SEQ ID NO: 2640 - protein, 16 aa, synthetic construct
  REGION 1..16: note = Description of sequence: CDR from Table 7
CASSVASGGYTDTQYF

SEQ ID NO: 2641 - protein, 15 aa, synthetic construct
  REGION 1..15: note = Description of sequence: CDR from Table 7
CASSRSRWEFYGYTF

SEQ ID NO: 2642 - protein, 12 aa, synthetic construct
  REGION 1..12: note = Description of sequence: CDR from Table 7
CASNRGYNEQFF

SEQ ID NO: 2643 - protein, 17 aa, synthetic construct
  REGION 1..17: note = Description of sequence: CDR from Table 7
CASSQAERGESYNEQFF

SEQ ID NO: 2644 - protein, 16 aa, synthetic construct
  REGION 1..16: note = Description of sequence: CDR from Table 7
CASSLGGNPTYNEQFF

SEQ ID NO: 2645 - protein, 13 aa, synthetic construct
  REGION 1..13: note = Description of sequence: CDR from Table 7
CASRIPDRNEQFF

SEQ ID NO: 2646 - protein, 13 aa, synthetic construct
  REGION 1..13: note = Description of sequence: CDR from Table 7
CAWSAGGTGELFF

SEQ ID NO: 2647 - protein, 12 aa, synthetic construct
  REGION 1..12: note = Description of sequence: CDR from Table 7
CAWMGSYNEQFF

SEQ ID NO: 2648 - protein, 13 aa, synthetic construct
  REGION 1..13: note = Description of sequence: CDR from Table 7
CASSLQGSYEQYF

SEQ ID NO: 2649 - protein, 15 aa, synthetic construct
  REGION 1..15: note = Description of sequence: CDR from Table 7
CSARPGLAGGYEQYF

SEQ ID NO: 2650 - protein, 13 aa, synthetic construct
  REGION 1..13: note = Description of sequence: CDR from Table 7
CASSYQTGNEQFF

SEQ ID NO: 2651 - protein, 15 aa, synthetic construct
  REGION 1..15: note = Description of sequence: CDR from Table 7
CASRGSGASTGELFF

SEQ ID NO: 2652 - protein, 13 aa, synthetic construct
  REGION 1..13: note = Description of sequence: CDR from Table 7
CASSGQGTDTQYF

SEQ ID NO: 2653 - protein, 14 aa, synthetic construct
  REGION 1..14: note = Description of sequence: CDR from Table 7
CASSLWAEPDTQYF

SEQ ID NO: 2654 - protein, 13 aa, synthetic construct
  REGION 1..13: note = Description of sequence: CDR from Table 7
CASSLGISYEQYF

SEQ ID NO: 2655 - protein, 13 aa, synthetic construct
  REGION 1..13: note = Description of sequence: CDR from Table 7
CASSQVTGYEQYF

SEQ ID NO: 2656 - protein, 15 aa, synthetic construct
  REGION 1..15: note = Description of sequence: CDR from Table 7
CASSQVSGGSYEQYF

SEQ ID NO: 2657 - protein, 15 aa, synthetic construct
  REGION 1..15: note = Description of sequence: CDR from Table 7
CASSQEPSGFYEQYF

SEQ ID NO: 2658 - protein, 12 aa, synthetic construct
  REGION 1..12: note = Description of sequence: CDR from Table 7
CASSQQGSEQYF

SEQ ID NO: 2659 - protein, 13 aa, synthetic construct
  REGION 1..13: note = Description of sequence: CDR from Table 7
CASSLGEDYEQYF

SEQ ID NO: 2660 - protein, 12 aa, synthetic construct
  REGION 1..12: note = Description of sequence: CDR from Table 7
CSVQGPYNEQFF

SEQ ID NO: 2661 - protein, 15 aa, synthetic construct
  REGION 1..15: note = Description of sequence: CDR from Table 7
CASSPGQGIDSPLHF

SEQ ID NO: 2662 - protein, 13 aa, synthetic construct
  REGION 1..13: note = Description of sequence: CDR from Table 7
CASSYSGGYEQYF

SEQ ID NO: 2663 - protein, 13 aa, synthetic construct
  REGION 1..13: note = Description of sequence: CDR from Table 7
CAWIRTGGYGYTF

SEQ ID NO: 2664 - protein, 13 aa, synthetic construct
  REGION 1..13: note = Description of sequence: CDR from Table 7
CASSPGGGYEQYF

SEQ ID NO: 2665 - protein, 13 aa, synthetic construct
  REGION 1..13: note = Description of sequence: CDR from Table 7
CASSFTVAGEQYF

SEQ ID NO: 2666 - protein, 13 aa, synthetic construct
  REGION 1..13: note = Description of sequence: CDR from Table 7
CASSYSGHNEQFF

SEQ ID NO: 2667 - protein, 13 aa, synthetic construct
  REGION 1..13: note = Description of sequence: CDR from Table 7
CASSYTIGNEQYF

SEQ ID NO: 2668 - protein, 14 aa, synthetic construct
  REGION 1..14: note = Description of sequence: CDR from Table 7
CAISDPDRGGRAFF

SEQ ID NO: 2669 - protein, 14 aa, synthetic construct
  REGION 1..14: note = Description of sequence: CDR from Table 7
CASTAGGGTDTQYF

SEQ ID NO: 2670 - protein, 15 aa, synthetic construct
  REGION 1..15: note = Description of sequence: CDR from Table 7
CASSYSPGAYTEAFF

SEQ ID NO: 2671 - protein, 13 aa, synthetic construct
  REGION 1..13: note = Description of sequence: CDR from Table 7
CSVWKENAFEQFF

SEQ ID NO: 2672 - protein, 13 aa, synthetic construct
  REGION 1..13: note = Description of sequence: CDR from Table 7
CASSQDTGYEQYF

SEQ ID NO: 2673 - protein, 10 aa, synthetic construct
  REGION 1..10: note = Description of sequence: CDR from Table 7
CASGLDTQYF

SEQ ID NO: 2674 - protein, 13 aa, synthetic construct
  REGION 1..13: note = Description of sequence: CDR from Table 7
CASSLTGVDGYTF

SEQ ID NO: 2675 - protein, 13 aa, synthetic construct
  REGION 1..13: note = Description of sequence: CDR from Table 7
CSAAYNTFGEQFF

SEQ ID NO: 2676 - protein, 12 aa, synthetic construct
  REGION 1..12: note = Description of sequence: CDR from Table 7
CSATSGTDTQYF

SEQ ID NO: 2677 - protein, 15 aa, synthetic construct
  REGION 1..15: note = Description of sequence: CDR from Table 7
CASSLGGFAGNTIYF

SEQ ID NO: 2678 - protein, 12 aa, synthetic construct
  REGION 1..12: note = Description of sequence: CDR from Table 7
CSSPGREGPQYF

SEQ ID NO: 2679 - protein, 13 aa, synthetic construct
  REGION 1..13: note = Description of sequence: CDR from Table 7
CASRGGDGETQYF

SEQ ID NO: 2680 - protein, 12 aa, synthetic construct
  REGION 1..12: note = Description of sequence: CDR from Table 7
CASGDSGALEFF

SEQ ID NO: 2681 - protein, 12 aa, synthetic construct
  REGION 1..12: note = Description of sequence: CDR from Table 7
CASSSAGTEAFF

SEQ ID NO: 2682 - protein, 15 aa, synthetic construct
  REGION 1..15: note = Description of sequence: CDR from Table 7
CASSQGGGGTDTQYF

SEQ ID NO: 2683 - protein, 12 aa, synthetic construct
  REGION 1..12: note = Description of sequence: CDR from Table 7
CATWDSGNIQYF

SEQ ID NO: 2684 - protein, 17 aa, synthetic construct
  REGION 1..17: note = Description of sequence: CDR from Table 7
CSATCNGTFLYQETQYF

SEQ ID NO: 2685 - protein, 18 aa, synthetic construct
  REGION 1..18: note = Description of sequence: CDR from Table 7
CASSQGPPGSGGGNEQFF

SEQ ID NO: 2686 - protein, 14 aa, synthetic construct
  REGION 1..14: note = Description of sequence: CDR from Table 7
CASSSLGDSYEQYF

SEQ ID NO: 2687 - protein, 12 aa, synthetic construct
  REGION 1..12: note = Description of sequence: CDR from Table 7
CASSLGGPGAFF

SEQ ID NO: 2688 - protein, 13 aa, synthetic construct
  REGION 1..13: note = Description of sequence: CDR from Table 7
CASSSDINYGYTF

SEQ ID NO: 2689 - protein, 13 aa, synthetic construct
  REGION 1..13: note = Description of sequence: CDR from Table 7
CASSYSSGYGYTF

SEQ ID NO: 2690 - protein, 9 aa, synthetic construct
  REGION 1..9: note = Description of sequence: Wildtype peptide from Table 8
VLVDDAHGL

SEQ ID NO: 2691 - protein, 9 aa, synthetic construct
  REGION 1..9: note = Description of sequence: Wildtype peptide from Table 8
YLDELIKNT

SEQ ID NO: 2692 - protein, 9 aa, synthetic construct
  REGION 1..9: note = Description of sequence: Wildtype peptide from Table 8
FLQSRGNEV

SEQ ID NO: 2693 - protein, 9 aa, synthetic construct
  REGION 1..9: note = Description of sequence: Wildtype peptide from Table 8
ILTDMEEKV

SEQ ID NO: 2694 - protein, 9 aa, synthetic construct
  REGION 1..9: note = Description of sequence: Wildtype peptide from Table 8
SMPDFDLHL

SEQ ID NO: 2695 - protein, 9 aa, synthetic construct
  REGION 1..9: note = Description of sequence: Wildtype peptide from Table 8
KLMNIQQQL

SEQ ID NO: 2696 - protein, 9 aa, synthetic construct
  REGION 1..9: note = Description of sequence: Wildtype peptide from Table 8
GMLPVDKPV

SEQ ID NO: 2697 - protein, 9 aa, synthetic construct
  REGION 1..9: note = Description of sequence: Wildtype peptide from Table 8
VQYLGMLPV

SEQ ID NO: 2698 - protein, 9 aa, synthetic construct
  REGION 1..9: note = Description of sequence: Wildtype peptide from Table 8
RLPHVEYEL

SEQ ID NO: 2699 - protein, 9 aa, synthetic construct
  REGION 1..9: note = Description of sequence: Wildtype peptide from Table 8
KLGASPLHV

SEQ ID NO: 2700 - protein, 9 aa, synthetic construct
  REGION 1..9: note = Description of sequence: Wildtype peptide from Table 8
ILNVDVFTL

SEQ ID NO: 2701 - protein, 9 aa, synthetic construct
  REGION 1..9: note = Description of sequence: Wildtype peptide from Table 8
FVYVFTTHL

SEQ ID NO: 2702 - protein, 9 aa, synthetic construct
  REGION 1..9: note = Description of sequence: Wildtype peptide from Table 8
FMLLTQARL

SEQ ID NO: 2703 - protein, 10 aa, synthetic construct
  REGION 1..10: note = Description of sequence: Wildtype peptide from Table 8
MLSILALVGV

SEQ ID NO: 2704 - protein, 9 aa, synthetic construct
  REGION 1..9: note = Description of sequence: Wildtype peptide from Table 8
ALSYTPVEV

SEQ ID NO: 2705 - protein, 10 aa, synthetic construct
  REGION 1..10: note = Description of sequence: Wildtype peptide from Table 8
NLMDGDLGLI

SEQ ID NO: 2706 - protein, 9 aa, synthetic construct
  REGION 1..9: note = Description of sequence: Wildtype peptide from Table 8
NLMDGDLGL

SEQ ID NO: 2707 - protein, 9 aa, synthetic construct
  REGION 1..9: note = Description of sequence: Wildtype peptide from Table 8
LMVLHSPSL

SEQ ID NO: 2708 - protein, 9 aa, synthetic construct
  REGION 1..9: note = Description of sequence: Wildtype peptide from Table 8
KLFEQILKA

SEQ ID NO: 2709 - protein, 9 aa, synthetic construct
  REGION 1..9: note = Description of sequence: Wildtype peptide from Table 8
YMLTLRTKL

SEQ ID NO: 2710 - protein, 9 aa, synthetic construct
  REGION 1..9: note = Description of sequence: Wildtype peptide from Table 8
GLTSFVIAI

SEQ ID NO: 2711 - protein, 9 aa, synthetic construct
  REGION 1..9: note = Description of sequence: Wildtype peptide from Table 8
FLSDHPYLV

SEQ ID NO: 2712 - protein, 9 aa, synthetic construct
  REGION 1..9: note = Description of sequence: Wildtype peptide from Table 8
YLFAIFSGL

SEQ ID NO: 2713 - protein, 9 aa, synthetic construct
  REGION 1..9: note = Description of sequence: Wildtype peptide from Table 8
KLNTITPVV

SEQ ID NO: 2714 - protein, 9 aa, synthetic construct
  REGION 1..9: note = Description of sequence: Wildtype peptide from Table 8
MLMFAVIVA

SEQ ID NO: 2715 - protein, 9 aa, synthetic construct
  REGION 1..9: note = Description of sequence: Wildtype peptide from Table 8
LLAGTLAGV

SEQ ID NO: 2716 - protein, 9 aa, synthetic construct
  REGION 1..9: note = Description of sequence: Wildtype peptide from Table 8
SLAPLSPRA

SEQ ID NO: 2717 - protein, 10 aa, synthetic construct
  REGION 1..10: note = Description of sequence: Wildtype peptide from Table 8
VLLGVKLSGV

SEQ ID NO: 2718 - protein, 9 aa, synthetic construct
  REGION 1..9: note = Description of sequence: Wildtype peptide from Table 8
TLFTIVGTV

SEQ ID NO: 2719 - protein, 9 aa, synthetic construct
  REGION 1..9: note = Description of sequence: Wildtype peptide from Table 8
LLAMKVPNV

SEQ ID NO: 2720 - protein, 9 aa, synthetic construct
  REGION 1..9: note = Description of sequence: Wildtype peptide from Table 8
LLAMKVPNV

SEQ ID NO: 2721 - protein, 10 aa, synthetic construct
  REGION 1..10: note = Description of sequence: Wildtype peptide from Table 8
FMTKINGLEV

SEQ ID NO: 2722 - protein, 9 aa, synthetic construct
  REGION 1..9: note = Description of sequence: Wildtype peptide from Table 8
FLNDLLSVM

SEQ ID NO: 2723 - protein, 9 aa, synthetic construct
  REGION 1..9: note = Description of sequence: Wildtype peptide from Table 8
GLMAIAWFI

SEQ ID NO: 2724 - protein, 9 aa, synthetic construct
  REGION 1..9: note = Description of sequence: Wildtype peptide from Table 8
FIISYVVAV

SEQ ID NO: 2725 - protein, 9 aa, synthetic construct
  REGION 1..9: note = Description of sequence: Wildtype peptide from Table 8
ALIHHNTHL

SEQ ID NO: 2726 - protein, 9 aa, synthetic construct
  REGION 1..9: note = Description of sequence: Wildtype peptide from Table 8
ILLDWAANV

SEQ ID NO: 2727 - protein, 9 aa, synthetic construct
  REGION 1..9: note = Description of sequence: Wildtype peptide from Table 8
ALFSELSPV

SEQ ID NO: 2728 - protein, 9 aa, synthetic construct
  REGION 1..9: note = Description of sequence: Wildtype peptide from Table 8
SLLEYYTEL

SEQ ID NO: 2729 - protein, 9 aa, synthetic construct
  REGION 1..9: note = Description of sequence: Wildtype peptide from Table 8
HIAKSPFEV

SEQ ID NO: 2730 - protein, 9 aa, synthetic construct
  REGION 1..9: note = Description of sequence: Wildtype peptide from Table 8
VVLSWAPPV

SEQ ID NO: 2731 - protein, 9 aa, synthetic construct
  REGION 1..9: note = Description of sequence: Wildtype peptide from Table 8
TAMDLFVTV

SEQ ID NO: 2732 - protein, 9 aa, synthetic construct
  REGION 1..9: note = Description of sequence: Wildtype peptide from Table 8
YVTAMDLFV

SEQ ID NO: 2733 - protein, 9 aa, synthetic construct
  REGION 1..9: note = Description of sequence: Wildtype peptide from Table 8
YVVTWIVGA

SEQ ID NO: 2734 - protein, 9 aa, synthetic construct
  REGION 1..9: note = Description of sequence: Wildtype peptide from Table 8
ALYGSVPVL

SEQ ID NO: 2735 - protein, 10 aa, synthetic construct
  REGION 1..10: note = Description of sequence: Wildtype peptide from Table 8
ALLETLSLLL

SEQ ID NO: 2736 - protein, 9 aa, synthetic construct
  REGION 1..9: note = Description of sequence: Wildtype peptide from Table 8
ALLETLSLL

SEQ ID NO: 2737 - protein, 9 aa, synthetic construct
  REGION 1..9: note = Description of sequence: Wildtype peptide from Table 8
LIFNMFYWI

SEQ ID NO: 2738 - protein, 9 aa, synthetic construct
  REGION 1..9: note = Description of sequence: Wildtype peptide from Table 8
SLDPTTSPV

SEQ ID NO: 2739 - protein, 9 aa, synthetic construct
  REGION 1..9: note = Description of sequence: Wildtype peptide from Table 8
KMSLANIYL

SEQ ID NO: 2740 - protein, 9 aa, synthetic construct
  REGION 1..9: note = Description of sequence: Wildtype peptide from Table 8
FSFPLDFLV

SEQ ID NO: 2741 - protein, 9 aa, synthetic construct
  REGION 1..9: note = Description of sequence: Wildtype peptide from Table 8
FLQEYTVKL

SEQ ID NO: 2742 - protein, 9 aa, synthetic construct
  REGION 1..9: note = Description of sequence: Wildtype peptide from Table 8
ILNAMITKI

SEQ ID NO: 2743 - protein, 9 aa, synthetic construct
  REGION 1..9: note = Description of sequence: Wildtype peptide from Table 8
KLSELHAYI

SEQ ID NO: 2744 - protein, 9 aa, synthetic construct
  REGION 1..9: note = Description of sequence: Wildtype peptide from Table 8
SLLLLPVSV

SEQ ID NO: 2745 - protein, 9 aa, synthetic construct
  REGION 1..9: note = Description of sequence: Wildtype peptide from Table 8
YMAKLTVTL

SEQ ID NO: 2746 - protein, 9 aa, synthetic construct
  REGION 1..9: note = Description of sequence: Wildtype peptide from Table 8
YMYGSPGEL

SEQ ID NO: 2747 - protein, 10 aa, synthetic construct
  REGION 1..10: note = Description of sequence: Wildtype peptide from Table 8
VMPFSIVYIV

SEQ ID NO: 2748 - protein, 9 aa, synthetic construct
  REGION 1..9: note = Description of sequence: Wildtype peptide from Table 8
VMPFSIVYI

SEQ ID NO: 2749 - protein, 10 aa, synthetic construct
  REGION 1..10: note = Description of sequence: Wildtype peptide from Table 8
LVMPFSIVYI

SEQ ID NO: 2750 - protein, 10 aa, synthetic construct
  REGION 1..10: note = Description of sequence: Wildtype peptide from Table 8
TMSSSHLFYL

SEQ ID NO: 2751 - protein, 9 aa, synthetic construct
  REGION 1..9: note = Description of sequence: Wildtype peptide from Table 8
FITGISILL

SEQ ID NO: 2752 - protein, 9 aa, synthetic construct
  REGION 1..9: note = Description of sequence: Wildtype peptide from Table 8
VLLHRAFLV

SEQ ID NO: 2753 - protein, 9 aa, synthetic construct
  REGION 1..9: note = Description of sequence: Wildtype peptide from Table 8
FSSEVLNLV

SEQ ID NO: 2754 - protein, 9 aa, synthetic construct
  REGION 1..9: note = Description of sequence: Wildtype peptide from Table 8
RLGPYLEFL

SEQ ID NO: 2755 - protein, 9 aa, synthetic construct
  REGION 1..9: note = Description of sequence: Wildtype peptide from Table 8
KLSREIMPV

SEQ ID NO: 2756 - protein, 9 aa, synthetic construct
  REGION 1..9: note = Description of sequence: Wildtype peptide from Table 8
LLAILPYYV

SEQ ID NO: 2757 - protein, 9 aa, synthetic construct
  REGION 1..9: note = Description of sequence: Wildtype peptide from Table 8
FLPDLNANA

SEQ ID NO: 2758 - protein, 9 aa, synthetic construct
  REGION 1..9: note = Description of sequence: Wildtype peptide from Table 8
YTSEISSPI

SEQ ID NO: 2759 - protein, 9 aa, synthetic construct
  REGION 1..9: note = Description of sequence: Wildtype peptide from Table 8
NLFNRYPAL

SEQ ID NO: 2760 - protein, 10 aa, synthetic construct
  REGION 1..10: note = Description of sequence: Wildtype peptide from Table 8
FLIASVTWLL

SEQ ID NO: 2761 - protein, 9 aa, synthetic construct
  REGION 1..9: note = Description of sequence: Wildtype peptide from Table 8
FLIASVTWL

SEQ ID NO: 2762 - protein, 9 aa, synthetic construct
  REGION 1..9: note = Description of sequence: Wildtype peptide from Table 8
FLDEFMEAV

SEQ ID NO: 2763 - protein, 9 aa, synthetic construct
  REGION 1..9: note = Description of sequence: Wildtype peptide from Table 8
ALSPVIPLI

SEQ ID NO: 2764 - protein, 9 aa, synthetic construct
  REGION 1..9: note = Description of sequence: Wildtype peptide from Table 8
YLWPAVQLA

SEQ ID NO: 2765 - protein, 9 aa, synthetic construct
  REGION 1..9: note = Description of sequence: Wildtype peptide from Table 8
RLWEPLRVV

SEQ ID NO: 2766 - protein, 10 aa, synthetic construct
  REGION 1..10: note = Description of sequence: Wildtype peptide from Table 8
LLFGMTPCLL

SEQ ID NO: 2767 - protein, 9 aa, synthetic construct
  REGION 1..9: note = Description of sequence: Wildtype peptide from Table 8
LLFGMTPCL

SEQ ID NO: 2768 - protein, 9 aa, synthetic construct
  REGION 1..9: note = Description of sequence: Wildtype peptide from Table 8
GLDETIAKL

SEQ ID NO: 2769 - protein, 9 aa, synthetic construct
  REGION 1..9: note = Description of sequence: Wildtype peptide from Table 8
RVIGMPPPV

SEQ ID NO: 2770 - protein, 9 aa, synthetic construct
  REGION 1..9: note = Description of sequence: Wildtype peptide from Table 8
LLDEKEPEV

SEQ ID NO: 2771 - protein, 9 aa, synthetic construct
  REGION 1..9: note = Description of sequence: Wildtype peptide from Table 8
FIDQYYSSI

SEQ ID NO: 2772 - protein, 9 aa, synthetic construct
  REGION 1..9: note = Description of sequence: Wildtype peptide from Table 8
ILTGLNYEA

SEQ ID NO: 2773 - protein, 9 aa, synthetic construct
  REGION 1..9: note = Description of sequence: Wildtype peptide from Table 8
ILDPADPTL

SEQ ID NO: 2774 - protein, 9 aa, synthetic construct
  REGION 1..9: note = Description of sequence: Wildtype peptide from Table 8
ILIVMVPFL

SEQ ID NO: 2775 - protein, 9 aa, synthetic construct
  REGION 1..9: note = Description of sequence: Wildtype peptide from Table 8
FMLYLVTLM

SEQ ID NO: 2776 - protein, 9 aa, synthetic construct
  REGION 1..9: note = Description of sequence: Wildtype peptide from Table 8
FLFMYLVTV

SEQ ID NO: 2777 - protein, 9 aa, synthetic construct
  REGION 1..9: note = Description of sequence: Wildtype peptide from Table 8
FLNVFFPLL

SEQ ID NO: 2778 - protein, 9 aa, synthetic construct
  REGION 1..9: note = Description of sequence: Wildtype peptide from Table 8
YIFLGNLAL

SEQ ID NO: 2779 - protein, 9 aa, synthetic construct
  REGION 1..9: note = Description of sequence: Wildtype peptide from Table 8
KMVAVFYTT

SEQ ID NO: 2780 - protein, 9 aa, synthetic construct
  REGION 1..9: note = Description of sequence: Wildtype peptide from Table 8
VLNPFIYTL

SEQ ID NO: 2781 - protein, 9 aa, synthetic construct
  REGION 1..9: note = Description of sequence: Wildtype peptide from Table 8
YVNELVVFV

SEQ ID NO: 2782 - protein, 10 aa, synthetic construct
  REGION 1..10: note = Description of sequence: Wildtype peptide from Table 8
FLGIYTVTVV

SEQ ID NO: 2783 - protein, 9 aa, synthetic construct
  REGION 1..9: note = Description of sequence: Wildtype peptide from Table 8
FLGIYTVTV

SEQ ID NO: 2784 - protein, 9 aa, synthetic construct
  REGION 1..9: note = Description of sequence: Wildtype peptide from Table 8
FLFTFFASI

SEQ ID NO: 2785 - protein, 9 aa, synthetic construct
  REGION 1..9: note = Description of sequence: Wildtype peptide from Table 8
SIDCYLLAI

SEQ ID NO: 2786 - protein, 9 aa, synthetic construct
  REGION 1..9: note = Description of sequence: Wildtype peptide from Table 8
SLLQGSPHL

SEQ ID NO: 2787 - protein, 9 aa, synthetic construct
  REGION 1..9: note = Description of sequence: Wildtype peptide from Table 8
MLGERLFPL

SEQ ID NO: 2788 - protein, 9 aa, synthetic construct
  REGION 1..9: note = Description of sequence: Wildtype peptide from Table 8
FLFSVLLFV

SEQ ID NO: 2789 - protein, 9 aa, synthetic construct
  REGION 1..9: note = Description of sequence: Wildtype peptide from Table 8
LVLPLVMGV

SEQ ID NO: 2790 - protein, 9 aa, synthetic construct
  REGION 1..9: note = Description of sequence: Wildtype peptide from Table 8
RLHDLVLPL

SEQ ID NO: 2791 - protein, 9 aa, synthetic construct
  REGION 1..9: note = Description of sequence: Wildtype peptide from Table 8
AVGSHVYSV

SEQ ID NO: 2792 - protein, 9 aa, synthetic construct
  REGION 1..9: note = Description of sequence: Wildtype peptide from Table 8
LLSIISFPA

SEQ ID NO: 2793 - protein, 9 aa, synthetic construct
  REGION 1..9: note = Description of sequence: Wildtype peptide from Table 8
FLTVFSPFM

SEQ ID NO: 2794 - protein, 9 aa, synthetic construct
  REGION 1..9: note = Description of sequence: Wildtype peptide from Table 8
VLFAAFSSA

SEQ ID NO: 2795 - protein, 9 aa, synthetic construct
  REGION 1..9: note = Description of sequence: Wildtype peptide from Table 8
LLLVSLWGL

SEQ ID NO: 2796 - protein, 9 aa, synthetic construct
  REGION 1..9: note = Description of sequence: Wildtype peptide from Table 8
HQLGGVVEV

SEQ ID NO: 2797 - protein, 9 aa, synthetic construct
  REGION 1..9: note = Description of sequence: Wildtype peptide from Table 8
SILDAVQRV

SEQ ID NO: 2798 - protein, 9 aa, synthetic construct
  REGION 1..9: note = Description of sequence: Wildtype peptide from Table 8
KLSEYRNSL

SEQ ID NO: 2799 - protein, 10 aa, synthetic construct
  REGION 1..10: note = Description of sequence: Wildtype peptide from Table 8
LLADQNLKFI

SEQ ID NO: 2800 - protein, 9 aa, synthetic construct
  REGION 1..9: note = Description of sequence: Wildtype peptide from Table 8
VLNYFEPYL

SEQ ID NO: 2801 - protein, 9 aa, synthetic construct
  REGION 1..9: note = Description of sequence: Wildtype peptide from Table 8
ALVGAIPSI

SEQ ID NO: 2802 - protein, 9 aa, synthetic construct
  REGION 1..9: note = Description of sequence: Wildtype peptide from Table 8
FLYNPLTRV

SEQ ID NO: 2803 - protein, 9 aa, synthetic construct
  REGION 1..9: note = Description of sequence: Wildtype peptide from Table 8
HMVEISTPV

SEQ ID NO: 2804 - protein, 9 aa, synthetic construct
  REGION 1..9: note = Description of sequence: Wildtype peptide from Table 8
KLLAGDEIV

SEQ ID NO: 2805 - protein, 10 aa, synthetic construct
  REGION 1..10: note = Description of sequence: Wildtype peptide from Table 8
ILGGQVVHTV

SEQ ID NO: 2806 - protein, 9 aa, synthetic construct
  REGION 1..9: note = Description of sequence: Wildtype peptide from Table 8
AMAGSPVFL

SEQ ID NO: 2807 - protein, 9 aa, synthetic construct
  REGION 1..9: note = Description of sequence: Wildtype peptide from Table 8
YMSTTIIAA

SEQ ID NO: 2808 - protein, 9 aa, synthetic construct
  REGION 1..9: note = Description of sequence: Wildtype peptide from Table 8
ILVAQIFGL

SEQ ID NO: 2809 - protein, 9 aa, synthetic construct
  REGION 1..9: note = Description of sequence: Wildtype peptide from Table 8
ILIAQVLGL

SEQ ID NO: 2810 - protein, 10 aa, synthetic construct
  REGION 1..10: note = Description of sequence: Wildtype peptide from Table 8
RIWAALFLGL

SEQ ID NO: 2811 - protein, 9 aa, synthetic construct
  REGION 1..9: note = Description of sequence: Wildtype peptide from Table 8
LLGGWTVLL

SEQ ID NO: 2812 - protein, 10 aa, synthetic construct
  REGION 1..10: note = Description of sequence: Wildtype peptide from Table 8
KLFEFLVHGV

SEQ ID NO: 2813 - protein, 9 aa, synthetic construct
  REGION 1..9: note = Description of sequence: Wildtype peptide from Table 8
KLAKPLPYT

SEQ ID NO: 2814 - protein, 9 aa, synthetic construct
  REGION 1..9: note = Description of sequence: Wildtype peptide from Table 8
KLSHQPVLL

SEQ ID NO: 2815 - protein, 9 aa, synthetic construct
  REGION 1..9: note = Description of sequence: Wildtype peptide from Table 8
FLLDEANGL

SEQ ID NO: 2816 - protein, 9 aa, synthetic construct
  REGION 1..9: note = Description of sequence: Wildtype peptide from Table 8
YLQDSLATT

SEQ ID NO: 2817 - protein, 10 aa, synthetic construct
  REGION 1..10: note = Description of sequence: Wildtype peptide from Table 8
FLMASISSSL

SEQ ID NO: 2818 - protein, 9 aa, synthetic construct
  REGION 1..9: note = Description of sequence: Wildtype peptide from Table 8
FLMASISSS

SEQ ID NO: 2819 - protein, 9 aa, synthetic construct
  REGION 1..9: note = Description of sequence: Wildtype peptide from Table 8
LMASISSSL

SEQ ID NO: 2820 - protein, 9 aa, synthetic construct
  REGION 1..9: note = Description of sequence: Wildtype peptide from Table 8
LLFALYFSA

SEQ ID NO: 2821 - protein, 9 aa, synthetic construct
  REGION 1..9: note = Description of sequence: Wildtype peptide from Table 8
RLMKHYPGI

SEQ ID NO: 2822 - protein, 9 aa, synthetic construct
  REGION 1..9: note = Description of sequence: Wildtype peptide from Table 8
FMSAYSGVL

SEQ ID NO: 2823 - protein, 9 aa, synthetic construct
  REGION 1..9: note = Description of sequence: Wildtype peptide from Table 8
GMGPLLATV

SEQ ID NO: 2824 - protein, 10 aa, synthetic construct
  REGION 1..10: note = Description of sequence: Wildtype peptide from Table 8
SVLENFTILL

SEQ ID NO: 2825 - protein, 10 aa, synthetic construct
  REGION 1..10: note = Description of sequence: Wildtype peptide from Table 8
VLENFTILLV

SEQ ID NO: 2826 - protein, 9 aa, synthetic construct
  REGION 1..9: note = Description of sequence: Wildtype peptide from Table 8
FLMTLETKM

SEQ ID NO: 2827 - protein, 10 aa, synthetic construct
  REGION 1..10: note = Description of sequence: Wildtype peptide from Table 8
VTFAVSFYLV

SEQ ID NO: 2828 - protein, 9 aa, synthetic construct
  REGION 1..9: note = Description of sequence: Wildtype peptide from Table 8
ALSQVTLLL

SEQ ID NO: 2829 - protein, 9 aa, synthetic construct
  REGION 1..9: note = Description of sequence: Wildtype peptide from Table 8
YTPEHAASV

SEQ ID NO: 2830 - protein, 9 aa, synthetic construct
  REGION 1..9: note = Description of sequence: Wildtype peptide from Table 8
SLAETFWET

SEQ ID NO: 2831 - protein, 9 aa, synthetic construct
  REGION 1..9: note = Description of sequence: Wildtype peptide from Table 8
RMAAISNTV

SEQ ID NO: 2832 - protein, 9 aa, synthetic construct
  REGION 1..9: note = Description of sequence: Wildtype peptide from Table 8
VLASPSVPL

SEQ ID NO: 2833 - protein, 9 aa, synthetic construct
  REGION 1..9: note = Description of sequence: Wildtype peptide from Table 8
YMVLASPSV

SEQ ID NO: 2834 - protein, 9 aa, synthetic construct
  REGION 1..9: note = Description of sequence: Wildtype peptide from Table 8
MLLKQDVSL

SEQ ID NO: 2835 - protein, 9 aa, synthetic construct
  REGION 1..9: note = Description of sequence: Wildtype peptide from Table 8
LLLNMLIAL

SEQ ID NO: 2836 - protein, 9 aa, synthetic construct
  REGION 1..9: note = Description of sequence: Wildtype peptide from Table 8
FMIGYASAL

SEQ ID NO: 2837 - protein, 9 aa, synthetic construct
  REGION 1..9: note = Description of sequence: Wildtype peptide from Table 8
YLLFMIGYA

SEQ ID NO: 2838 - protein, 9 aa, synthetic construct
  REGION 1..9: note = Description of sequence: Wildtype peptide from Table 8
KLPLDINPV

SEQ ID NO: 2839 - protein, 9 aa, synthetic construct
  REGION 1..9: note = Description of sequence: Wildtype peptide from Table 8
SQLNQSFEI

SEQ ID NO: 2840 - protein, 9 aa, synthetic construct
  REGION 1..9: note = Description of sequence: Wildtype peptide from Table 8
LIIPCIHLI

SEQ ID NO: 2841 - protein, 9 aa, synthetic construct
  REGION 1..9: note = Description of sequence: Wildtype peptide from Table 8
LMLWASSSI

SEQ ID NO: 2842 - protein, 9 aa, synthetic construct
  REGION 1..9: note = Description of sequence: Wildtype peptide from Table 8
MIISHLSLI

SEQ ID NO: 2843 - protein, 9 aa, synthetic construct
  REGION 1..9: note = Description of sequence: Wildtype peptide from Table 8
FLTYLDVSV

SEQ ID NO: 2844 - protein, 9 aa, synthetic construct
  REGION 1..9: note = Description of sequence: Wildtype peptide from Table 8
LLLTFNVSV

SEQ ID NO: 2845 - protein, 9 aa, synthetic construct
  REGION 1..9: note = Description of sequence: Wildtype peptide from Table 8
SLLWMNPFV

SEQ ID NO: 2846 - protein, 9 aa, synthetic construct
  REGION 1..9: note = Description of sequence: Wildtype peptide from Table 8
FTQEEWYHV

SEQ ID NO: 2847 - protein, 9 aa, synthetic construct
  REGION 1..9: note = Description of sequence: Wildtype peptide from Table 8
NLFSQDISV

SEQ ID NO: 2848 - protein, 9 aa, synthetic construct
  REGION 1..9: note = Description of sequence: Mutant peptide from Table 8
MLVDDAHGL

SEQ ID NO: 2849 - protein, 9 aa, synthetic construct
  REGION 1..9: note = Description of sequence: Mutant peptide from Table 8
YLDELIRNT

SEQ ID NO: 2850 - protein, 9 aa, synthetic construct
  REGION 1..9: note = Description of sequence: Mutant peptide from Table 8
FLQFRGNEV

SEQ ID NO: 2851 - protein, 9 aa, synthetic construct
  REGION 1..9: note = Description of sequence: Mutant peptide from Table 8
ILTDIEEKV

SEQ ID NO: 2852 - protein, 9 aa, synthetic construct
  REGION 1..9: note = Description of sequence: Mutant peptide from Table 8
FMPDFDLHL

SEQ ID NO: 2853 - protein, 9 aa, synthetic construct
  REGION 1..9: note = Description of sequence: Mutant peptide from Table 8
KLMNIQQKL

SEQ ID NO: 2854 - protein, 9 aa, synthetic construct
  REGION 1..9: note = Description of sequence: Mutant peptide from Table 8
GMFPVDKPV

SEQ ID NO: 2855 - protein, 9 aa, synthetic construct
  REGION 1..9: note = Description of sequence: Mutant peptide from Table 8
VQYLGMFPV

SEQ ID NO: 2856 - protein, 9 aa, synthetic construct
  REGION 1..9: note = Description of sequence: Mutant peptide from Table 8
WLPHVEYEL

SEQ ID NO: 2857 - protein, 9 aa, synthetic construct
  REGION 1..9: note = Description of sequence: Mutant peptide from Table 8
KLWASPLHV

SEQ ID NO: 2858 - protein, 9 aa, synthetic construct
  REGION 1..9: note = Description of sequence: Mutant peptide from Table 8
ILNVDIFTL

SEQ ID NO: 2859 - protein, 9 aa, synthetic construct
  REGION 1..9: note = Description of sequence: Mutant peptide from Table 8
FVYVFITHL

SEQ ID NO: 2860 - protein, 9 aa, synthetic construct
  REGION 1..9: note = Description of sequence: Mutant peptide from Table 8
FMLLTQARI

SEQ ID NO: 2861 - protein, 10 aa, synthetic construct
  REGION 1..10: note = Description of sequence: Mutant peptide from Table 8
MLSILALVRV

SEQ ID NO: 2862 - protein, 9 aa, synthetic construct
  REGION 1..9: note = Description of sequence: Mutant peptide from Table 8
ALSYTPAEV

SEQ ID NO: 2863 - protein, 10 aa, synthetic construct
  REGION 1..10: note = Description of sequence: Mutant peptide from Table 8
HLMDGDLGLI

SEQ ID NO: 2864 - protein, 9 aa, synthetic construct
  REGION 1..9: note = Description of sequence: Mutant peptide from Table 8
HLMDGDLGL

SEQ ID NO: 2865 - protein, 9 aa, synthetic construct
  REGION 1..9: note = Description of sequence: Mutant peptide from Table 8
LMVPHSPSL

SEQ ID NO: 2866 - protein, 9 aa, synthetic construct
  REGION 1..9: note = Description of sequence: Mutant peptide from Table 8
KLFEQILNA

SEQ ID NO: 2867 - protein, 9 aa, synthetic construct
  REGION 1..9: note = Description of sequence: Mutant peptide from Table 8
YMLTLHTKL

SEQ ID NO: 2868 - protein, 9 aa, synthetic construct
  REGION 1..9: note = Description of sequence: Mutant peptide from Table 8
GLTSFFIAI

SEQ ID NO: 2869 - protein, 9 aa, synthetic construct
  REGION 1..9: note = Description of sequence: Mutant peptide from Table 8
FLSDHLYLV

SEQ ID NO: 2870 - protein, 9 aa, synthetic construct
  REGION 1..9: note = Description of sequence: Mutant peptide from Table 8
YLLAIFSGL

SEQ ID NO: 2871 - protein, 9 aa, synthetic construct
  REGION 1..9: note = Description of sequence: Mutant peptide from Table 8
KLNTITAVV

SEQ ID NO: 2872 - protein, 9 aa, synthetic construct
  REGION 1..9: note = Description of sequence: Mutant peptide from Table 8
MLMLAVIVA

SEQ ID NO: 2873 - protein, 9 aa, synthetic construct
  REGION 1..9: note = Description of sequence: Mutant peptide from Table 8
LLAGTLAVV

SEQ ID NO: 2874 - protein, 9 aa, synthetic construct
  REGION 1..9: note = Description of sequence: Mutant peptide from Table 8
SLAPLSPRV

SEQ ID NO: 2875 - protein, 10 aa, synthetic construct
  REGION 1..10: note = Description of sequence: Mutant peptide from Table 8
VLLGVKLFGV

SEQ ID NO: 2876 - protein, 9 aa, synthetic construct
  REGION 1..9: note = Description of sequence: Mutant peptide from Table 8
TLFTMVGTV

SEQ ID NO: 2877 - protein, 9 aa, synthetic construct
  REGION 1..9: note = Description of sequence: Mutant peptide from Table 8
LLAIKVPNV

SEQ ID NO: 2878 - protein, 9 aa, synthetic construct
  REGION 1..9: note = Description of sequence: Mutant peptide from Table 8
LLAMTVPNV

SEQ ID NO: 2879 - protein, 10 aa, synthetic construct
  REGION 1..10: note = Description of sequence: Mutant peptide from Table 8
FMTKINDLEV

SEQ ID NO: 2880 - protein, 9 aa, synthetic construct
  REGION 1..9: note = Description of sequence: Mutant peptide from Table 8
FLNDLLSVL

SEQ ID NO: 2881 - protein, 9 aa, synthetic construct
  REGION 1..9: note = Description of sequence: Mutant peptide from Table 8
GLMVIAWFI

SEQ ID NO: 2882 - protein, 9 aa, synthetic construct
  REGION 1..9: note = Description of sequence: Mutant peptide from Table 8
FIFSYVVAV

SEQ ID NO: 2883 - protein, 9 aa, synthetic construct
  REGION 1..9: note = Description of sequence: Mutant peptide from Table 8
ALIHHNTYL

SEQ ID NO: 2884 - protein, 9 aa, synthetic construct
  REGION 1..9: note = Description of sequence: Mutant peptide from Table 8
ILLDWAANI

SEQ ID NO: 2885 - protein, 9 aa, synthetic construct
  REGION 1..9: note = Description of sequence: Mutant peptide from Table 8
SLFSELSPV

SEQ ID NO: 2886 - protein, 9 aa, synthetic construct
  REGION 1..9: note = Description of sequence: Mutant peptide from Table 8
SVLEYYTEL

SEQ ID NO: 2887 - protein, 9 aa, synthetic construct
  REGION 1..9: note = Description of sequence: Mutant peptide from Table 8
HIAKSLFEV

SEQ ID NO: 2888 - protein, 9 aa, synthetic construct
  REGION 1..9: note = Description of sequence: Mutant peptide from Table 8
VVMSWAPPV

SEQ ID NO: 2889 - protein, 9 aa, synthetic construct
  REGION 1..9: note = Description of sequence: Mutant peptide from Table 8
TAMDIFVTV

SEQ ID NO: 2890 - protein, 9 aa, synthetic construct
  REGION 1..9: note = Description of sequence: Mutant peptide from Table 8
YVTAMDIFV

SEQ ID NO: 2891 - protein, 9 aa, synthetic construct
  REGION 1..9: note = Description of sequence: Mutant peptide from Table 8
YVLTWIVGA

SEQ ID NO: 2892 - protein, 9 aa, synthetic construct
  REGION 1..9: note = Description of sequence: Mutant peptide from Table 8
ALYGFVPVL

SEQ ID NO: 2893 - protein, 10 aa, synthetic construct
  REGION 1..10: note = Description of sequence: Mutant peptide from Table 8
ALLETPSLLL

SEQ ID NO: 2894 - protein, 9 aa, synthetic construct
  REGION 1..9: note = Description of sequence: Mutant peptide from Table 8
ALLETPSLL

SEQ ID NO: 2895 - protein, 9 aa, synthetic construct
  REGION 1..9: note = Description of sequence: Mutant peptide from Table 8
LIFNMLYWI

SEQ ID NO: 2896 - protein, 9 aa, synthetic construct
  REGION 1..9: note = Description of sequence: Mutant peptide from Table 8
SLDLTTSPV

SEQ ID NO: 2897 - protein, 9 aa, synthetic construct
  REGION 1..9: note = Description of sequence: Mutant peptide from Table 8
KMPLANIYL

SEQ ID NO: 2898 - protein, 9 aa, synthetic construct
  REGION 1..9: note = Description of sequence: Mutant peptide from Table 8
FSFSLDFLV

SEQ ID NO: 2899 - protein, 9 aa, synthetic construct
  REGION 1..9: note = Description of sequence: Mutant peptide from Table 8
FLQKYTVKL

SEQ ID NO: 2900 - protein, 9 aa, synthetic construct
  REGION 1..9: note = Description of sequence: Mutant peptide from Table 8
ILNAMIAKI

SEQ ID NO: 2901 - protein, 9 aa, synthetic construct
  REGION 1..9: note = Description of sequence: Mutant peptide from Table 8
KLSELHTYI

SEQ ID NO: 2902 - protein, 9 aa, synthetic construct
  REGION 1..9: note = Description of sequence: Mutant peptide from Table 8
SLLLLSVSV

SEQ ID NO: 2903 - protein, 9 aa, synthetic construct
  REGION 1..9: note = Description of sequence: Mutant peptide from Table 8
YMAELTVTL

SEQ ID NO: 2904 - protein, 9 aa, synthetic construct
  REGION 1..9: note = Description of sequence: Mutant peptide from Table 8
YMYDSPGEL

SEQ ID NO: 2905 - protein, 10 aa, synthetic construct
  REGION 1..10: note = Description of sequence: Mutant peptide from Table 8
MMPFSIVYIV

SEQ ID NO: 2906 - protein, 9 aa, synthetic construct
  REGION 1..9: note = Description of sequence: Mutant peptide from Table 8
MMPFSIVYI

SEQ ID NO: 2907 - protein, 10 aa, synthetic construct
  REGION 1..10: note = Description of sequence: Mutant peptide from Table 8
LMMPFSIVYI

SEQ ID NO: 2908 - protein, 10 aa, synthetic construct
  REGION 1..10: note = Description of sequence: Mutant peptide from Table 8
TMSFSHLFYL

SEQ ID NO: 2909 - protein, 9 aa, synthetic construct
  REGION 1..9: note = Description of sequence: Mutant peptide from Table 8
FIMGISILL

SEQ ID NO: 2910 - protein, 9 aa, synthetic construct
  REGION 1..9: note = Description of sequence: Mutant peptide from Table 8
VLFHRAFLV

SEQ ID NO: 2911 - protein, 9 aa, synthetic construct
  REGION 1..9: note = Description of sequence: Mutant peptide from Table 8
FSSDVLNLV

SEQ ID NO: 2912 - protein, 9 aa, synthetic construct
  REGION 1..9: note = Description of sequence: Mutant peptide from Table 8
RLVPYLEFL

SEQ ID NO: 2913 - protein, 9 aa, synthetic construct
  REGION 1..9: note = Description of sequence: Mutant peptide from Table 8
KLSREIKPV

SEQ ID NO: 2914 - protein, 9 aa, synthetic construct
  REGION 1..9: note = Description of sequence: Mutant peptide from Table 8
LLAILTYYV

SEQ ID NO: 2915 - protein, 9 aa, synthetic construct
  REGION 1..9: note = Description of sequence: Mutant peptide from Table 8
FLPDLNVNA

SEQ ID NO: 2916 - protein, 9 aa, synthetic construct
  REGION 1..9: note = Description of sequence: Mutant peptide from Table 8
YTSEILSPI

SEQ ID NO: 2917 - protein, 9 aa, synthetic construct
  REGION 1..9: note = Description of sequence: Mutant peptide from Table 8
NLFNRYLAL

SEQ ID NO: 2918 - protein, 10 aa, synthetic construct
  REGION 1..10: note = Description of sequence: Mutant peptide from Table 8
LLIASVTWLL

SEQ ID NO: 2919 - protein, 9 aa, synthetic construct
  REGION 1..9: note = Description of sequence: Mutant peptide from Table 8
LLIASVTWL

SEQ ID NO: 2920 - protein, 9 aa, synthetic construct
  REGION 1..9: note = Description of sequence: Mutant peptide from Table 8
FLDEFMEGV

SEQ ID NO: 2921 - protein, 9 aa, synthetic construct
  REGION 1..9: note = Description of sequence: Mutant peptide from Table 8
ALSPVIPHI

SEQ ID NO: 2922 - protein, 9 aa, synthetic construct
  REGION 1..9: note = Description of sequence: Mutant peptide from Table 8
YLWPPVQLA

SEQ ID NO: 2923 - protein, 9 aa, synthetic construct
  REGION 1..9: note = Description of sequence: Mutant peptide from Table 8
WLWEPLRVV

SEQ ID NO: 2924 - protein, 10 aa, synthetic construct
  REGION 1..10: note = Description of sequence: Mutant peptide from Table 8
LLFGMPPCLL

SEQ ID NO: 2925 - protein, 9 aa, synthetic construct
  REGION 1..9: note = Description of sequence: Mutant peptide from Table 8
LLFGMPPCL

SEQ ID NO: 2926 - protein, 9 aa, synthetic construct
  REGION 1..9: note = Description of sequence: Mutant peptide from Table 8
GLNETIAKL

SEQ ID NO: 2927 - protein, 9 aa, synthetic construct
  REGION 1..9: note = Description of sequence: Mutant peptide from Table 8
LVIGMPPPV

SEQ ID NO: 2928 - protein, 9 aa, synthetic construct
  REGION 1..9: note = Description of sequence: Mutant peptide from Table 8
LLDEKGPEV

SEQ ID NO: 2929 - protein, 9 aa, synthetic construct
  REGION 1..9: note = Description of sequence: Mutant peptide from Table 8
FIYQYYSSI

SEQ ID NO: 2930 - protein, 9 aa, synthetic construct
  REGION 1..9: note = Description of sequence: Mutant peptide from Table 8
ILTGLNYEV

SEQ ID NO: 2931 - protein, 9 aa, synthetic construct
  REGION 1..9: note = Description of sequence: Mutant peptide from Table 8
ILNPADPTL

SEQ ID NO: 2932 - protein, 9 aa, synthetic construct
  REGION 1..9: note = Description of sequence: Mutant peptide from Table 8
ILIVMFPFL

SEQ ID NO: 2933 - protein, 9 aa, synthetic construct
  REGION 1..9: note = Description of sequence: Mutant peptide from Table 8
FMLYLLTLM

SEQ ID NO: 2934 - protein, 9 aa, synthetic construct
  REGION 1..9: note = Description of sequence: Mutant peptide from Table 8
FLFMYLVMV

SEQ ID NO: 2935 - protein, 9 aa, synthetic construct
  REGION 1..9: note = Description of sequence: Mutant peptide from Table 8
FLNVLFPLL

SEQ ID NO: 2936 - protein, 9 aa, synthetic construct
  REGION 1..9: note = Description of sequence: Mutant peptide from Table 8
YIFLENLAL

SEQ ID NO: 2937 - protein, 9 aa, synthetic construct
  REGION 1..9: note = Description of sequence: Mutant peptide from Table 8
KMVAVFYNT

SEQ ID NO: 2938 - protein, 9 aa, synthetic construct
  REGION 1..9: note = Description of sequence: Mutant peptide from Table 8
VLNPFIYML

SEQ ID NO: 2939 - protein, 9 aa, synthetic construct
  REGION 1..9: note = Description of sequence: Mutant peptide from Table 8
YLNELVVFV

SEQ ID NO: 2940 - protein, 10 aa, synthetic construct
  REGION 1..10: note = Description of sequence: Mutant peptide from Table 8
FLEIYTVTVV

SEQ ID NO: 2941 - protein, 9 aa, synthetic construct
  REGION 1..9: note = Description of sequence: Mutant peptide from Table 8
FLEIYTVTV

SEQ ID NO: 2942 - protein, 9 aa, synthetic construct
  REGION 1..9: note = Description of sequence: Mutant peptide from Table 8
FLFTFFAFI

SEQ ID NO: 2943 - protein, 9 aa, synthetic construct
  REGION 1..9: note = Description of sequence: Mutant peptide from Table 8
FIDCYLLAI

SEQ ID NO: 2944 - protein, 9 aa, synthetic construct
  REGION 1..9: note = Description of sequence: Mutant peptide from Table 8
SLLQGSPHV

SEQ ID NO: 2945 - protein, 9 aa, synthetic construct
  REGION 1..9: note = Description of sequence: Mutant peptide from Table 8
MLGEQLFPL

SEQ ID NO: 2946 - protein, 9 aa, synthetic construct
  REGION 1..9: note = Description of sequence: Mutant peptide from Table 8
FLFLVLLFV

SEQ ID NO: 2947 - protein, 9 aa, synthetic construct
  REGION 1..9: note = Description of sequence: Mutant peptide from Table 8
LVFPLVMGV

SEQ ID NO: 2948 - protein, 9 aa, synthetic construct
  REGION 1..9: note = Description of sequence: Mutant peptide from Table 8
RLHDLVFPL

SEQ ID NO: 2949 - protein, 9 aa, synthetic construct
  REGION 1..9: note = Description of sequence: Mutant peptide from Table 8
AVGSYVYSV

SEQ ID NO: 2950 - protein, 9 aa, synthetic construct
  REGION 1..9: note = Description of sequence: Mutant peptide from Table 8
LLSIIFFPA

SEQ ID NO: 2951 - protein, 9 aa, synthetic construct
  REGION 1..9: note = Description of sequence: Mutant peptide from Table 8
FLTVFSHFM

SEQ ID NO: 2952 - protein, 9 aa, synthetic construct
  REGION 1..9: note = Description of sequence: Mutant peptide from Table 8
LLFAAFSSA

SEQ ID NO: 2953 - protein, 9 aa, synthetic construct
  REGION 1..9: note = Description of sequence: Mutant peptide from Table 8
QLLVSLWGL

SEQ ID NO: 2954 - protein, 9 aa, synthetic construct
  REGION 1..9: note = Description of sequence: Mutant peptide from Table 8
HQLGVVVEV

SEQ ID NO: 2955 - protein, 9 aa, synthetic construct
  REGION 1..9: note = Description of sequence: Mutant peptide from Table 8
FILDAVQRV

SEQ ID NO: 2956 - protein, 9 aa, synthetic construct
  REGION 1..9: note = Description of sequence: Mutant peptide from Table 8
KLSEYHNSL

SEQ ID NO: 2957 - protein, 10 aa, synthetic construct
  REGION 1..10: note = Description of sequence: Mutant peptide from Table 8
LLADQNFKFI

SEQ ID NO: 2958 - protein, 9 aa, synthetic construct
  REGION 1..9: note = Description of sequence: Mutant peptide from Table 8
VLNYFKPYL

SEQ ID NO: 2959 - protein, 9 aa, synthetic construct
  REGION 1..9: note = Description of sequence: Mutant peptide from Table 8
ALVGAISSI

SEQ ID NO: 2960 - protein, 9 aa, synthetic construct
  REGION 1..9: note = Description of sequence: Mutant peptide from Table 8
FLYNLLTRV

SEQ ID NO: 2961 - protein, 9 aa, synthetic construct
  REGION 1..9: note = Description of sequence: Mutant peptide from Table 8
HIVEISTPV

SEQ ID NO: 2962 - protein, 9 aa, synthetic construct
  REGION 1..9: note = Description of sequence: Mutant peptide from Table 8
KLLAGVEIV

SEQ ID NO: 2963 - protein, 10 aa, synthetic construct
  REGION 1..10: note = Description of sequence: Mutant peptide from Table 8
ILGEQVVHTV

SEQ ID NO: 2964 - protein, 9 aa, synthetic construct
  REGION 1..9: note = Description of sequence: Mutant peptide from Table 8
AMAGSLVFL

SEQ ID NO: 2965 - protein, 9 aa, synthetic construct
  REGION 1..9: note = Description of sequence: Mutant peptide from Table 8
YMPTTIIAA

SEQ ID NO: 2966 - protein, 9 aa, synthetic construct
  REGION 1..9: note = Description of sequence: Mutant peptide from Table 8
ILVAQIFGM

SEQ ID NO: 2967 - protein, 9 aa, synthetic construct
  REGION 1..9: note = Description of sequence: Mutant peptide from Table 8
ILITQVLGL

SEQ ID NO: 2968 - protein, 10 aa, synthetic construct
  REGION 1..10: note = Description of sequence: Mutant peptide from Table 8
RILAALFLGL

SEQ ID NO: 2969 - protein, 9 aa, synthetic construct
  REGION 1..9: note = Description of sequence: Mutant peptide from Table 8
LLGSWTVLL

SEQ ID NO: 2970 - protein, 10 aa, synthetic construct
  REGION 1..10: note = Description of sequence: Mutant peptide from Table 8
KLFEFLVYGV

SEQ ID NO: 2971 - protein, 9 aa, synthetic construct
  REGION 1..9: note = Description of sequence: Mutant peptide from Table 8
KLANPLPYT

SEQ ID NO: 2972 - protein, 9 aa, synthetic construct
  REGION 1..9: note = Description of sequence: Mutant peptide from Table 8
KLSHQLVLL

SEQ ID NO: 2973 - protein, 9 aa, synthetic construct
  REGION 1..9: note = Description of sequence: Mutant peptide from Table 8
FLLDEAIGL

SEQ ID NO: 2974 - protein, 9 aa, synthetic construct
  REGION 1..9: note = Description of sequence: Mutant peptide from Table 8
YLQDSMATT

SEQ ID NO: 2975 - protein, 10 aa, synthetic construct
  REGION 1..10: note = Description of sequence: Mutant peptide from Table 8
FLMASISSFL

SEQ ID NO: 2976 - protein, 9 aa, synthetic construct
  REGION 1..9: note = Description of sequence: Mutant peptide from Table 8
FLMASISSF

SEQ ID NO: 2977 - protein, 9 aa, synthetic construct
  REGION 1..9: note = Description of sequence: Mutant peptide from Table 8
LMASISSFL

SEQ ID NO: 2978 - protein, 9 aa, synthetic construct
  REGION 1..9: note = Description of sequence: Mutant peptide from Table 8
LLFALHFSA

SEQ ID NO: 2979 - protein, 9 aa, synthetic construct
  REGION 1..9: note = Description of sequence: Mutant peptide from Table 8
RLIKHYPGI

SEQ ID NO: 2980 - protein, 9 aa, synthetic construct
  REGION 1..9: note = Description of sequence: Mutant peptide from Table 8
FMSSYSGVL

SEQ ID NO: 2981 - protein, 9 aa, synthetic construct
  REGION 1..9: note = Description of sequence: Mutant peptide from Table 8
GMGPLLAMV

SEQ ID NO: 2982 - protein, 10 aa, synthetic construct
  REGION 1..10: note = Description of sequence: Mutant peptide from Table 8
SVLENFTIFL

SEQ ID NO: 2983 - protein, 10 aa, synthetic construct
  REGION 1..10: note = Description of sequence: Mutant peptide from Table 8
VLENFTIFLV

SEQ ID NO: 2984 - protein, 9 aa, synthetic construct
  REGION 1..9: note = Description of sequence: Mutant peptide from Table 8
FLMTLETNM

SEQ ID NO: 2985 - protein, 10 aa, synthetic construct
  REGION 1..10: note = Description of sequence: Mutant peptide from Table 8
VTFAVSFYVV

SEQ ID NO: 2986 - protein, 9 aa, synthetic construct
  REGION 1..9: note = Description of sequence: Mutant peptide from Table 8
ALLQVTLLL

SEQ ID NO: 2987 - protein, 9 aa, synthetic construct
  REGION 1..9: note = Description of sequence: Mutant peptide from Table 8
YTSEHAASV

SEQ ID NO: 2988 - protein, 9 aa, synthetic construct
  REGION 1..9: note = Description of sequence: Mutant peptide from Table 8
SLAETFLET

SEQ ID NO: 2989 - protein, 9 aa, synthetic construct
  REGION 1..9: note = Description of sequence: Mutant peptide from Table 8
TMAAISNTV

SEQ ID NO: 2990 - protein, 9 aa, synthetic construct
  REGION 1..9: note = Description of sequence: Mutant peptide from Table 8
FLASPSVPL

SEQ ID NO: 2991 - protein, 9 aa, synthetic construct
  REGION 1..9: note = Description of sequence: Mutant peptide from Table 8
YMFLASPSV

SEQ ID NO: 2992 - protein, 9 aa, synthetic construct
  REGION 1..9: note = Description of sequence: Mutant peptide from Table 8
MLLKHDVSL

SEQ ID NO: 2993 - protein, 9 aa, synthetic construct
  REGION 1..9: note = Description of sequence: Mutant peptide from Table 8
LLLNMLIVL

SEQ ID NO: 2994 - protein, 9 aa, synthetic construct
  REGION 1..9: note = Description of sequence: Mutant peptide from Table 8
FMIGYTSAL

SEQ ID NO: 2995 - protein, 9 aa, synthetic construct
  REGION 1..9: note = Description of sequence: Mutant peptide from Table 8
YLLFMIGYT

SEQ ID NO: 2996 - protein, 9 aa, synthetic construct
  REGION 1..9: note = Description of sequence: Mutant peptide from Table 8
KLPLDIDPV

SEQ ID NO: 2997 - protein, 9 aa, synthetic construct
  REGION 1..9: note = Description of sequence: Mutant peptide from Table 8
FQLNQSFEI

SEQ ID NO: 2998 - protein, 9 aa, synthetic construct
  REGION 1..9: note = Description of sequence: Mutant peptide from Table 8
LIIPFIHLI

SEQ ID NO: 2999 - protein, 9 aa, synthetic construct
  REGION 1..9: note = Description of sequence: Mutant peptide from Table 8
LMFWASSSI

SEQ ID NO: 3000 - protein, 9 aa, synthetic construct
  REGION 1..9: note = Description of sequence: Mutant peptide from Table 8
MIISHLYLI

SEQ ID NO: 3001 - protein, 9 aa, synthetic construct
  REGION 1..9: note = Description of sequence: Mutant peptide from Table 8
FLIYLDVSV

SEQ ID NO: 3002 - protein, 9 aa, synthetic construct
  REGION 1..9: note = Description of sequence: Mutant peptide from Table 8
LLLIFNVSV

SEQ ID NO: 3003 - protein, 9 aa, synthetic construct
  REGION 1..9: note = Description of sequence: Mutant peptide from Table 8
SLLWMNLFV

SEQ ID NO: 3004 - protein, 9 aa, synthetic construct
  REGION 1..9: note = Description of sequence: Mutant peptide from Table 8
FTQEKWYHV

SEQ ID NO: 3005 - protein, 9 aa, synthetic construct
  REGION 1..9: note = Description of sequence: Mutant peptide from Table 8
NLFIQDISV

SEQ ID NO: 3006 - protein, 14 aa, synthetic construct
  REGION 1..14: note = Description of sequence: CDR3 from Table 9
CAYRSPPSSEKLVF

SEQ ID NO: 3007 - protein, 14 aa, synthetic construct
  REGION 1..14: note = Description of sequence: CDR3 from Table 9
CAVGAEDSNYQLIW

SEQ ID NO: 3008 - protein, 11 aa, synthetic construct
  REGION 1..11: note = Description of sequence: CDR3 from Table 9
CATDVNNDMRF

SEQ ID NO: 3009 - protein, 13 aa, synthetic construct
  REGION 1..13: note = Description of sequence: CDR3 from Table 9
CASFMDSNYQLIW

SEQ ID NO: 3010 - protein, 15 aa, synthetic construct
  REGION 1..15: note = Description of sequence: CDR3 from Table 9
CAMRASLQGAQKLVF

SEQ ID NO: 3011 - protein, 19 aa, synthetic construct
  REGION 1..19: note = Description of sequence: CDR3 from Table 9
CATDAQFLRSGAGSYQLTF

SEQ ID NO: 3012 - protein, 11 aa, synthetic construct
  REGION 1..11: note = Description of sequence: CDR3 from Table 9
CALWGTYKYIF

SEQ ID NO: 3013 - protein, 10 aa, synthetic construct
  REGION 1..10: note = Description of sequence: CDR3 from Table 9
CAVGGEKLTF

SEQ ID NO: 3014 - protein, 16 aa, synthetic construct
  REGION 1..16: note = Description of sequence: CDR3 from Table 9
CAASATGGTSYGKLTF

SEQ ID NO: 3015 - protein, 12 aa, synthetic construct
  REGION 1..12: note = Description of sequence: CDR3 from Table 9
CASEVGGYALNF

SEQ ID NO: 3016 - protein, 12 aa, synthetic construct
  REGION 1..12: note = Description of sequence: CDR3 from Table 9
CAPHSGYSTLTF

SEQ ID NO: 3017 - protein, 11 aa, synthetic construct
  REGION 1..11: note = Description of sequence: CDR3 from Table 9
CAVIGTDKLIF

SEQ ID NO: 3018 - protein, 15 aa, synthetic construct
  REGION 1..15: note = Description of sequence: CDR3 from Table 9
CAASHGSSNTGKLIF

SEQ ID NO: 3019 - protein, 11 aa, synthetic construct
  REGION 1..11: note = Description of sequence: CDR3 from Table 9
CAFSGNTPLVF

SEQ ID NO: 3020 - protein, 15 aa, synthetic construct
  REGION 1..15: note = Description of sequence: CDR3 from Table 9
CALSDRGGGADGLTF

SEQ ID NO: 3021 - protein, 13 aa, synthetic construct
  REGION 1..13: note = Description of sequence: CDR3 from Table 9
CAVGGDSSYKLIF

SEQ ID NO: 3022 - protein, 13 aa, synthetic construct
  REGION 1..13: note = Description of sequence: CDR3 from Table 9
CAAPPDSSYKLIF

SEQ ID NO: 3023 - protein, 14 aa, synthetic construct
  REGION 1..14: note = Description of sequence: CDR3 from Table 9
CAVTPTDSWGKLQF

SEQ ID NO: 3024 - protein, 16 aa, synthetic construct
  REGION 1..16: note = Description of sequence: CDR3 from Table 9
CAVRPLNTGTASKLTF

SEQ ID NO: 3025 - protein, 10 aa, synthetic construct
  REGION 1..10: note = Description of sequence: CDR3 from Table 9
CAVEGSRLTF

SEQ ID NO: 3026 - protein, 14 aa, synthetic construct
  REGION 1..14: note = Description of sequence: CDR3 from Table 9
CAVNAPTGFQKLVF

SEQ ID NO: 3027 - protein, 13 aa, synthetic construct
  REGION 1..13: note = Description of sequence: CDR3 from Table 9
CAFRQGGSEKLVF

SEQ ID NO: 3028 - protein, 16 aa, synthetic construct
  REGION 1..16: note = Description of sequence: CDR3 from Table 9
CAVREYSGGGADGLTF

SEQ ID NO: 3029 - protein, 14 aa, synthetic construct
  REGION 1..14: note = Description of sequence: CDR3 from Table 9
CALSEAYNNNDMRF

SEQ ID NO: 3030 - protein, 14 aa, synthetic construct
  REGION 1..14: note = Description of sequence: CDR3 from Table 9
CVVNVDNAGNMLTF

SEQ ID NO: 3031 - protein, 15 aa, synthetic construct
  REGION 1..15: note = Description of sequence: CDR3 from Table 9
CAARLYGGSQGNLIF

SEQ ID NO: 3032 - protein, 15 aa, synthetic construct
  REGION 1..15: note = Description of sequence: CDR3 from Table 9
CAVNEGGTSYGKLTF

SEQ ID NO: 3033 - protein, 13 aa, synthetic construct
  REGION 1..13: note = Description of sequence: CDR3 from Table 9
CAVFTGGGNKLTF

SEQ ID NO: 3034 - protein, 14 aa, synthetic construct
  REGION 1..14: note = Description of sequence: CDR3 from Table 9
CAISMDTGRRALTF

SEQ ID NO: 3035 - protein, 16 aa, synthetic construct
  REGION 1..16: note = Description of sequence: CDR3 from Table 9
CAVRLVGGTSYGKLTF

SEQ ID NO: 3036 - protein, 11 aa, synthetic construct
  REGION 1..11: note = Description of sequence: CDR3 from Table 9
CATLGDNDMRF

SEQ ID NO: 3037 - protein, 12 aa, synthetic construct
  REGION 1..12: note = Description of sequence: CDR3 from Table 9
CAMREGWGDMRF

SEQ ID NO: 3038 - protein, 16 aa, synthetic construct
  REGION 1..16: note = Description of sequence: CDR3 from Table 9
CALSGFGMDSSYKLIF

SEQ ID NO: 3039 - protein, 13 aa, synthetic construct
  REGION 1..13: note = Description of sequence: CDR3 from Table 9
CAGIGAGSYQLTF

SEQ ID NO: 3040 - protein, 13 aa, synthetic construct
  REGION 1..13: note = Description of sequence: CDR3 from Table 9
CAFLMDSSYKLIF

SEQ ID NO: 3041 - protein, 15 aa, synthetic construct
  REGION 1..15: note = Description of sequence: CDR3 from Table 9
CAFIGYGGSQGNLIF

SEQ ID NO: 3042 - protein, 13 aa, synthetic construct
  REGION 1..13: note = Description of sequence: CDR3 from Table 9
CAVLTSGYSTLTF

SEQ ID NO: 3043 - protein, 13 aa, synthetic construct
  REGION 1..13: note = Description of sequence: CDR3 from Table 9
CAFIIQGAQKLVF

SEQ ID NO: 3044 - protein, 12 aa, synthetic construct
  REGION 1..12: note = Description of sequence: CDR3 from Table 9
CAVNSGYSTLTF

SEQ ID NO: 3045 - protein, 16 aa, synthetic construct
  REGION 1..16: note = Description of sequence: CDR3 from Table 9
CAATEGGHNYGQNFVF

SEQ ID NO: 3046 - protein, 13 aa, synthetic construct
  REGION 1..13: note = Description of sequence: CDR3 from Table 9
CIVSPGGYQKVTF

SEQ ID NO: 3047 - protein, 11 aa, synthetic construct
  REGION 1..11: note = Description of sequence: CDR3 from Table 9
CAVNGGDKIIF

SEQ ID NO: 3048 - protein, 20 aa, synthetic construct
  REGION 1..20: note = Description of sequence: CDR3 from Table 9
CAMRERGSYAGGTSYGKLTF

SEQ ID NO: 3049 - protein, 13 aa, synthetic construct
  REGION 1..13: note = Description of sequence: CDR3 from Table 9
CAVNKANDYKLSF

SEQ ID NO: 3050 - protein, 12 aa, synthetic construct
  REGION 1..12: note = Description of sequence: CDR3 from Table 9
CAVTADGQKLLF

SEQ ID NO: 3051 - protein, 13 aa, synthetic construct
  REGION 1..13: note = Description of sequence: CDR3 from Table 9
CAVRDDNNNDMRF

SEQ ID NO: 3052 - protein, 15 aa, synthetic construct
  REGION 1..15: note = Description of sequence: CDR3 from Table 9
CALSEANTGGFKTIF

SEQ ID NO: 3053 - protein, 13 aa, synthetic construct
  REGION 1..13: note = Description of sequence: CDR3 from Table 9
CAMREGDRNQFYF

SEQ ID NO: 3054 - protein, 19 aa, synthetic construct
  REGION 1..19: note = Description of sequence: CDR3 from Table 9
CAMREAPENGGTSYGKLTF

SEQ ID NO: 3055 - protein, 12 aa, synthetic construct
  REGION 1..12: note = Description of sequence: CDR3 from Table 9
CAVRSNDYKLSF

SEQ ID NO: 3056 - protein, 12 aa, synthetic construct
  REGION 1..12: note = Description of sequence: CDR3 from Table 9
CVVRGGYNKLIF

SEQ ID NO: 3057 - protein, 12 aa, synthetic construct
  REGION 1..12: note = Description of sequence: CDR3 from Table 9
CAETGAGNMLTF

SEQ ID NO: 3058 - protein, 10 aa, synthetic construct
  REGION 1..10: note = Description of sequence: CDR3 from Table 9
CAFYDYKLSF

SEQ ID NO: 3059 - protein, 15 aa, synthetic construct
  REGION 1..15: note = Description of sequence: CDR3 from Table 9
CALSDPYSSASKIIF

SEQ ID NO: 3060 - protein, 13 aa, synthetic construct
  REGION 1..13: note = Description of sequence: CDR3 from Table 9
CAMREGQDARLMF

SEQ ID NO: 3061 - protein, 12 aa, synthetic construct
  REGION 1..12: note = Description of sequence: CDR3 from Table 9
CARPEAGNMLTF

SEQ ID NO: 3062 - protein, 15 aa, synthetic construct
  REGION 1..15: note = Description of sequence: CDR3 from Table 9
CATDEANFGNEKLTF

SEQ ID NO: 3063 - protein, 11 aa, synthetic construct
  REGION 1..11: note = Description of sequence: CDR3 from Table 9
CAVREGFKTIF

SEQ ID NO: 3064 - protein, 12 aa, synthetic construct
  REGION 1..12: note = Description of sequence: CDR3 from Table 9
CGRTDSWGKLQF

SEQ ID NO: 3065 - protein, 12 aa, synthetic construct
  REGION 1..12: note = Description of sequence: CDR3 from Table 9
CAYRKENNDMRF

SEQ ID NO: 3066 - protein, 12 aa, synthetic construct
  REGION 1..12: note = Description of sequence: CDR3 from Table 9
CAVIAGGFKTIF

SEQ ID NO: 3067 - protein, 16 aa, synthetic construct
  REGION 1..16: note = Description of sequence: CDR3 from Table 9
CAVGRRNSGGYQKVTF

SEQ ID NO: 3068 - protein, 15 aa, synthetic construct
  REGION 1..15: note = Description of sequence: CDR3 from Table 9
CATFPMKTSYDKVIF

SEQ ID NO: 3069 - protein, 14 aa, synthetic construct
  REGION 1..14: note = Description of sequence: CDR3 from Table 9
CAVGLGGGYNKLIF

SEQ ID NO: 3070 - protein, 13 aa, synthetic construct
  REGION 1..13: note = Description of sequence: CDR3 from Table 9
CAVNEERTDKLIF

SEQ ID NO: 3071 - protein, 13 aa, synthetic construct
  REGION 1..13: note = Description of sequence: CDR3 from Table 9
CAVASGGYNKLIF

SEQ ID NO: 3072 - protein, 14 aa, synthetic construct
  REGION 1..14: note = Description of sequence: CDR3 from Table 9
CAYRSGEYGNKLVF

SEQ ID NO: 3073 - protein, 10 aa, synthetic construct
  REGION 1..10: note = Description of sequence: CDR3 from Table 9
CAGNDYKLSF

SEQ ID NO: 3074 - protein, 13 aa, synthetic construct
  REGION 1..13: note = Description of sequence: CDR3 from Table 9
CALSDPNDYKLSF

SEQ ID NO: 3075 - protein, 14 aa, synthetic construct
  REGION 1..14: note = Description of sequence: CDR3 from Table 9
CAVYSGGGADGLTF

SEQ ID NO: 3076 - protein, 19 aa, synthetic construct
  REGION 1..19: note = Description of sequence: CDR3 from Table 9
CAMREGLSNYGGSQGNLIF

SEQ ID NO: 3077 - protein, 13 aa, synthetic construct
  REGION 1..13: note = Description of sequence: CDR3 from Table 9
CAASGGGAQKLVF

SEQ ID NO: 3078 - protein, 12 aa, synthetic construct
  REGION 1..12: note = Description of sequence: CDR3 from Table 9
CLLGGSNYKLTF

SEQ ID NO: 3079 - protein, 14 aa, synthetic construct
  REGION 1..14: note = Description of sequence: CDR3 from Table 9
CAMRAGYNTDKLIF

SEQ ID NO: 3080 - protein, 11 aa, synthetic construct
  REGION 1..11: note = Description of sequence: CDR3 from Table 9
CAVGSQGNLIF

SEQ ID NO: 3081 - protein, 11 aa, synthetic construct
  REGION 1..11: note = Description of sequence: CDR3 from Table 9
CAVSGYSTLTF

SEQ ID NO: 3082 - protein, 19 aa, synthetic construct
  REGION 1..19: note = Description of sequence: CDR3 from Table 9
CAEIPRSPMFSGGYNKLIF

SEQ ID NO: 3083 - protein, 14 aa, synthetic construct
  REGION 1..14: note = Description of sequence: CDR3 from Table 9
CAETLYNQGGKLIF

SEQ ID NO: 3084 - protein, 14 aa, synthetic construct
  REGION 1..14: note = Description of sequence: CDR3 from Table 9
CVVERGSTLGRLYF

SEQ ID NO: 3085 - protein, 10 aa, synthetic construct
  REGION 1..10: note = Description of sequence: CDR3 from Table 9
CAMGDARLMF

SEQ ID NO: 3086 - protein, 14 aa, synthetic construct
  REGION 1..14: note = Description of sequence: CDR3 from Table 9
CAVLNSGGYQKVTF

SEQ ID NO: 3087 - protein, 14 aa, synthetic construct
  REGION 1..14: note = Description of sequence: CDR3 from Table 9
CAVTDNNAGNMLTF

SEQ ID NO: 3088 - protein, 16 aa, synthetic construct
  REGION 1..16: note = Description of sequence: CDR3 from Table 9
CALDILISGGSYIPTF

SEQ ID NO: 3089 - protein, 15 aa, synthetic construct
  REGION 1..15: note = Description of sequence: CDR3 from Table 9
CALSSPTYNNNDMRF

SEQ ID NO: 3090 - protein, 14 aa, synthetic construct
  REGION 1..14: note = Description of sequence: CDR3 from Table 9
CAFESGGGADGLTF

SEQ ID NO: 3091 - protein, 11 aa, synthetic construct
  REGION 1..11: note = Description of sequence: CDR3 from Table 9
CAVRGGNDMRF

SEQ ID NO: 3092 - protein, 11 aa, synthetic construct
  REGION 1..11: note = Description of sequence: CDR3 from Table 9
CAVNTRTALIF

SEQ ID NO: 3093 - protein, 12 aa, synthetic construct
  REGION 1..12: note = Description of sequence: CDR3 from Table 9
CACMDSNYQLIW

SEQ ID NO: 3094 - protein, 14 aa, synthetic construct
  REGION 1..14: note = Description of sequence: CDR3 from Table 9
CAVTLTGGGNKLTF

SEQ ID NO: 3095 - protein, 19 aa, synthetic construct
  REGION 1..19: note = Description of sequence: CDR3 from Table 9
CAMRELSGNYGGSQGNLIF

SEQ ID NO: 3096 - protein, 13 aa, synthetic construct
  REGION 1..13: note = Description of sequence: CDR3 from Table 9
CAMSVPGYSTLTF

SEQ ID NO: 3097 - protein, 15 aa, synthetic construct
  REGION 1..15: note = Description of sequence: CDR3 from Table 9
CAMREGNTGGFKTIF

SEQ ID NO: 3098 - protein, 13 aa, synthetic construct
  REGION 1..13: note = Description of sequence: CDR3 from Table 9
CAVNAPGTYKYIF

SEQ ID NO: 3099 - protein, 13 aa, synthetic construct
  REGION 1..13: note = Description of sequence: CDR3 from Table 9
CAVSYDSNYQLIW

SEQ ID NO: 3100 - protein, 15 aa, synthetic construct
  REGION 1..15: note = Description of sequence: CDR3 from Table 9
CAVGARNTGFQKLVF

SEQ ID NO: 3101 - protein, 13 aa, synthetic construct
  REGION 1..13: note = Description of sequence: CDR3 from Table 9
CAAATGGGNKLTF

SEQ ID NO: 3102 - protein, 13 aa, synthetic construct
  REGION 1..13: note = Description of sequence: CDR3 from Table 9
CAVKGGSQGNLIF

SEQ ID NO: 3103 - protein, 18 aa, synthetic construct
  REGION 1..18: note = Description of sequence: CDR3 from Table 9
CAVRPTSPYGGSQGNLIF

SEQ ID NO: 3104 - protein, 11 aa, synthetic construct
  REGION 1..11: note = Description of sequence: CDR3 from Table 9
CAVKGTDKLIF

SEQ ID NO: 3105 - protein, 10 aa, synthetic construct
  REGION 1..10: note = Description of sequence: CDR3 from Table 9
CALGTHDMRF

SEQ ID NO: 3106 - protein, 14 aa, synthetic construct
  REGION 1..14: note = Description of sequence: CDR3 from Table 9
CARMSTDSWGKLQF

SEQ ID NO: 3107 - protein, 15 aa, synthetic construct
  REGION 1..15: note = Description of sequence: CDR3 from Table 9
CAAFMFSGGYNKLIF

SEQ ID NO: 3108 - protein, 13 aa, synthetic construct
  REGION 1..13: note = Description of sequence: CDR3 from Table 9
CVVSNQAGTALIF

SEQ ID NO: 3109 - protein, 14 aa, synthetic construct
  REGION 1..14: note = Description of sequence: CDR3 from Table 9
CAVRFNTGFQKLVF

SEQ ID NO: 3110 - protein, 13 aa, synthetic construct
  REGION 1..13: note = Description of sequence: CDR3 from Table 9
CAGRGMVGNKLVF

SEQ ID NO: 3111 - protein, 10 aa, synthetic construct
  REGION 1..10: note = Description of sequence: CDR3 from Table 9
CLIRDDKIIF

SEQ ID NO: 3112 - protein, 15 aa, synthetic construct
  REGION 1..15: note = Description of sequence: CDR3 from Table 9
CVVMPPGSGYSTLTF

SEQ ID NO: 3113 - protein, 14 aa, synthetic construct
  REGION 1..14: note = Description of sequence: CDR3 from Table 9
CAMRETDSSYKLIF

SEQ ID NO: 3114 - protein, 10 aa, synthetic construct
  REGION 1..10: note = Description of sequence: CDR3 from Table 9
CATGGPDMRF

SEQ ID NO: 3115 - protein, 15 aa, synthetic construct
  REGION 1..15: note = Description of sequence: CDR3 from Table 9
CALKNLGNYGQNFVF

SEQ ID NO: 3116 - protein, 13 aa, synthetic construct
  REGION 1..13: note = Description of sequence: CDR3 from Table 9
CAVQAGNTDKLIF

SEQ ID NO: 3117 - protein, 14 aa, synthetic construct
  REGION 1..14: note = Description of sequence: CDR3 from Table 9
CAASANNQGGKLIF

SEQ ID NO: 3118 - protein, 12 aa, synthetic construct
  REGION 1..12: note = Description of sequence: CDR3 from Table 9
CVVGPGANNLFF

SEQ ID NO: 3119 - protein, 14 aa, synthetic construct
  REGION 1..14: note = Description of sequence: CDR3 from Table 9
CAVSTGGGADGLTF

SEQ ID NO: 3120 - protein, 11 aa, synthetic construct
  REGION 1..11: note = Description of sequence: CDR3 from Table 9
CIVRVAGQFYF

SEQ ID NO: 3121 - protein, 12 aa, synthetic construct
  REGION 1..12: note = Description of sequence: CDR3 from Table 9
CAETPNDYKLSF

SEQ ID NO: 3122 - protein, 15 aa, synthetic construct
  REGION 1..15: note = Description of sequence: CDR3 from Table 9
CAFDFSSGSARQLTF

SEQ ID NO: 3123 - protein, 8 aa, synthetic construct
  REGION 1..8: note = Description of sequence: CDR3 from Table 9
CAVNRLVF

SEQ ID NO: 3124 - protein, 13 aa, synthetic construct
  REGION 1..13: note = Description of sequence: CDR3 from Table 9
CAVTKNTGNQFYF

SEQ ID NO: 3125 - protein, 14 aa, synthetic construct
  REGION 1..14: note = Description of sequence: CDR3 from Table 9
CAMSVSSNDYKLSF

SEQ ID NO: 3126 - protein, 13 aa, synthetic construct
  REGION 1..13: note = Description of sequence: CDR3 from Table 9
CAVRLGGSYIPTF

SEQ ID NO: 3127 - protein, 11 aa, synthetic construct
  REGION 1..11: note = Description of sequence: CDR3 from Table 9
CAMSGDYKLSF

SEQ ID NO: 3128 - protein, 15 aa, synthetic construct
  REGION 1..15: note = Description of sequence: CDR3 from Table 9
CGSADRGSTLGRLYF

SEQ ID NO: 3129 - protein, 16 aa, synthetic construct
  REGION 1..16: note = Description of sequence: CDR3 from Table 9
CALSEAEGYSGYALNF

SEQ ID NO: 3130 - protein, 14 aa, synthetic construct
  REGION 1..14: note = Description of sequence: CDR3 from Table 9
CAGVFGGSNYKLTF

SEQ ID NO: 3131 - protein, 14 aa, synthetic construct
  REGION 1..14: note = Description of sequence: CDR3 from Table 9
CAFILVANAGKSTF

SEQ ID NO: 3132 - protein, 15 aa, synthetic construct
  REGION 1..15: note = Description of sequence: CDR3 from Table 9
CAMREVAGAGNKLTF

SEQ ID NO: 3133 - protein, 11 aa, synthetic construct
  REGION 1..11: note = Description of sequence: CDR3 from Table 9
CAYGEDDKIIF

SEQ ID NO: 3134 - protein, 13 aa, synthetic construct
  REGION 1..13: note = Description of sequence: CDR3 from Table 9
CALRFNSSYKLIF

SEQ ID NO: 3135 - protein, 15 aa, synthetic construct
  REGION 1..15: note = Description of sequence: CDR3 from Table 9
CAESKESGGYQKVTF

SEQ ID NO: 3136 - protein, 15 aa, synthetic construct
  REGION 1..15: note = Description of sequence: CDR3 from Table 9
CAMREPRGGRRALTF

SEQ ID NO: 3137 - protein, 15 aa, synthetic construct
  REGION 1..15: note = Description of sequence: CDR3 from Table 9
CALRGFQDSNYQLIW

SEQ ID NO: 3138 - protein, 12 aa, synthetic construct
  REGION 1..12: note = Description of sequence: CDR3 from Table 9
CAVTSDGQKLLF

SEQ ID NO: 3139 - protein, 14 aa, synthetic construct
  REGION 1..14: note = Description of sequence: CDR3 from Table 9
CILRDPYNTDKLIF

SEQ ID NO: 3140 - protein, 17 aa, synthetic construct
  REGION 1..17: note = Description of sequence: CDR3 from Table 9
CAYRTGDSGAGSYQLTF

SEQ ID NO: 3141 - protein, 12 aa, synthetic construct
  REGION 1..12: note = Description of sequence: CDR3 from Table 9
CAFIWNDYKLSF

SEQ ID NO: 3142 - protein, 14 aa, synthetic construct
  REGION 1..14: note = Description of sequence: CDR3 from Table 9
CATDAEDSNYQLIW

SEQ ID NO: 3143 - protein, 16 aa, synthetic construct
  REGION 1..16: note = Description of sequence: CDR3 from Table 9
CAMREAFAGTASKLTF

SEQ ID NO: 3144 - protein, 14 aa, synthetic construct
  REGION 1..14: note = Description of sequence: CDR3 from Table 9
CAEIGVGGYQKVTF

SEQ ID NO: 3145 - protein, 16 aa, synthetic construct
  REGION 1..16: note = Description of sequence: CDR3 from Table 9
CAASGAGGTSYGKLTF

SEQ ID NO: 3146 - protein, 15 aa, synthetic construct
  REGION 1..15: note = Description of sequence: CDR3 from Table 9
CALSEASRDFQKLVF

SEQ ID NO: 3147 - protein, 10 aa, synthetic construct
  REGION 1..10: note = Description of sequence: CDR3 from Table 9
CAYTSNDMRF

SEQ ID NO: 3148 - protein, 16 aa, synthetic construct
  REGION 1..16: note = Description of sequence: CDR3 from Table 9
CAVPLAGGTSYGKLTF

SEQ ID NO: 3149 - protein, 16 aa, synthetic construct
  REGION 1..16: note = Description of sequence: CDR3 from Table 9
CALSEAGYSSASKIIF

SEQ ID NO: 3150 - protein, 15 aa, synthetic construct
  REGION 1..15: note = Description of sequence: CDR3 from Table 9
CAGLPDQTGANNLFF

SEQ ID NO: 3151 - protein, 15 aa, synthetic construct
  REGION 1..15: note = Description of sequence: CDR3 from Table 9
CAVAYSGGGADGLTF

SEQ ID NO: 3152 - protein, 11 aa, synthetic construct
  REGION 1..11: note = Description of sequence: CDR3 from Table 9
CVVNGNNDMRF

SEQ ID NO: 3153 - protein, 13 aa, synthetic construct
  REGION 1..13: note = Description of sequence: CDR3 from Table 9
CAASSSNTGKLIF

SEQ ID NO: 3154 - protein, 13 aa, synthetic construct
  REGION 1..13: note = Description of sequence: CDR3 from Table 9
CAVSDLAGQKLLF

SEQ ID NO: 3155 - protein, 10 aa, synthetic construct
  REGION 1..10: note = Description of sequence: CDR3 from Table 9
CAMGDYKLSF

SEQ ID NO: 3156 - protein, 14 aa, synthetic construct
  REGION 1..14: note = Description of sequence: CDR3 from Table 9
CAMSAGNQGGKLIF

SEQ ID NO: 3157 - protein, 19 aa, synthetic construct
  REGION 1..19: note = Description of sequence: CDR3 from Table 9
CAASSPLNAGGTSYGKLTF

SEQ ID NO: 3158 - protein, 12 aa, synthetic construct
  REGION 1..12: note = Description of sequence: CDR3 from Table 9
CAATGGSYIPTF

SEQ ID NO: 3159 - protein, 14 aa, synthetic construct
  REGION 1..14: note = Description of sequence: CDR3 from Table 9
CAVFGLSNDYKLSF

SEQ ID NO: 3160 - protein, 13 aa, synthetic construct
  REGION 1..13: note = Description of sequence: CDR3 from Table 9
CAVNAPDGQKLLF

SEQ ID NO: 3161 - protein, 12 aa, synthetic construct
  REGION 1..12: note = Description of sequence: CDR3 from Table 9
CAVPEGNTPLVF

SEQ ID NO: 3162 - protein, 13 aa, synthetic construct
  REGION 1..13: note = Description of sequence: CDR3 from Table 9
CAVVIGFGNVLHC

SEQ ID NO: 3163 - protein, 12 aa, synthetic construct
  REGION 1..12: note = Description of sequence: CDR3 from Table 9
CAVNGYGNKLVF

SEQ ID NO: 3164 - protein, 13 aa, synthetic construct
  REGION 1..13: note = Description of sequence: CDR3 from Table 9
CAVNQSGYSTLTF

SEQ ID NO: 3165 - protein, 14 aa, synthetic construct
  REGION 1..14: note = Description of sequence: CDR3 from Table 9
CAVRDIDSNYQLIW

SEQ ID NO: 3166 - protein, 14 aa, synthetic construct
  REGION 1..14: note = Description of sequence: CDR3 from Table 9
CAVRDIGDNNDMRF

SEQ ID NO: 3167 - protein, 15 aa, synthetic construct
  REGION 1..15: note = Description of sequence: CDR3 from Table 9
CAASESNFGNEKLTF

SEQ ID NO: 3168 - protein, 11 aa, synthetic construct
  REGION 1..11: note = Description of sequence: CDR3 from Table 9
CLLGDNNDMRF

SEQ ID NO: 3169 - protein, 17 aa, synthetic construct
  REGION 1..17: note = Description of sequence: CDR3 from Table 9
CAVGAWDSGGSNYKLTF

SEQ ID NO: 3170 - protein, 16 aa, synthetic construct
  REGION 1..16: note = Description of sequence: CDR3 from Table 9
CALSEAGSWGNTPLVF

SEQ ID NO: 3171 - protein, 12 aa, synthetic construct
  REGION 1..12: note = Description of sequence: CDR3 from Table 9
CAVSGGYNKLIF

SEQ ID NO: 3172 - protein, 13 aa, synthetic construct
  REGION 1..13: note = Description of sequence: CDR3 from Table 9
CALAGGGADGLTF

SEQ ID NO: 3173 - protein, 12 aa, synthetic construct
  REGION 1..12: note = Description of sequence: CDR3 from Table 9
CAVIYNFNKFYF

SEQ ID NO: 3174 - protein, 13 aa, synthetic construct
  REGION 1..13: note = Description of sequence: CDR3 from Table 9
CAGDQNTGNQFYF

SEQ ID NO: 3175 - protein, 15 aa, synthetic construct
  REGION 1..15: note = Description of sequence: CDR3 from Table 9
CALSPRSSNTGKLIF

SEQ ID NO: 3176 - protein, 13 aa, synthetic construct
  REGION 1..13: note = Description of sequence: CDR3 from Table 9
CAVKGGGADGLTF

SEQ ID NO: 3177 - protein, 11 aa, synthetic construct
  REGION 1..11: note = Description of sequence: CDR3 from Table 9
CALSTGNQFYF

SEQ ID NO: 3178 - protein, 13 aa, synthetic construct
  REGION 1..13: note = Description of sequence: CDR3 from Table 9
CALKTYSNYQLIW

SEQ ID NO: 3179 - protein, 12 aa, synthetic construct
  REGION 1..12: note = Description of sequence: CDR3 from Table 9
CAGFGGYQKVTF

SEQ ID NO: 3180 - protein, 11 aa, synthetic construct
  REGION 1..11: note = Description of sequence: CDR3 from Table 9
CAVNSNYQLIW

SEQ ID NO: 3181 - protein, 14 aa, synthetic construct
  REGION 1..14: note = Description of sequence: CDR3 from Table 9
CAVNMYGGYQKVTF

SEQ ID NO: 3182 - protein, 11 aa, synthetic construct
  REGION 1..11: note = Description of sequence: CDR3 from Table 9
CAVSEWDDMRF

SEQ ID NO: 3183 - protein, 14 aa, synthetic construct
  REGION 1..14: note = Description of sequence: CDR3 from Table 9
CAVDSGGGADGLTF

SEQ ID NO: 3184 - protein, 14 aa, synthetic construct
  REGION 1..14: note = Description of sequence: CDR3 from Table 9
CALSEAEGNTPLVF

SEQ ID NO: 3185 - protein, 17 aa, synthetic construct
  REGION 1..17: note = Description of sequence: CDR3 from Table 9
CAVEDRGGNTGFQKLVF

SEQ ID NO: 3186 - protein, 15 aa, synthetic construct
  REGION 1..15: note = Description of sequence: CDR3 from Table 9
CATDLWSGAGNMLTF

SEQ ID NO: 3187 - protein, 14 aa, synthetic construct
  REGION 1..14: note = Description of sequence: CDR3 from Table 9
CAPVSGGGADGLTF

SEQ ID NO: 3188 - protein, 13 aa, synthetic construct
  REGION 1..13: note = Description of sequence: CDR3 from Table 9
CAMRALYYGKLTF

SEQ ID NO: 3189 - protein, 12 aa, synthetic construct
  REGION 1..12: note = Description of sequence: CDR3 from Table 9
CAVNGGWGKLQF

SEQ ID NO: 3190 - protein, 12 aa, synthetic construct
  REGION 1..12: note = Description of sequence: CDR3 from Table 9
CAGALAFNDMRF

SEQ ID NO: 3191 - protein, 14 aa, synthetic construct
  REGION 1..14: note = Description of sequence: CDR3 from Table 9
CAVRDPYNFNKFYF

SEQ ID NO: 3192 - protein, 12 aa, synthetic construct
  REGION 1..12: note = Description of sequence: CDR3 from Table 9
CAGARRDDKIIF

SEQ ID NO: 3193 - protein, 12 aa, synthetic construct
  REGION 1..12: note = Description of sequence: CDR3 from Table 9
CAVKTSYDKVIF

SEQ ID NO: 3194 - protein, 15 aa, synthetic construct
  REGION 1..15: note = Description of sequence: CDR3 from Table 9
CAVTTTSGGYQKVTF

SEQ ID NO: 3195 - protein, 13 aa, synthetic construct
  REGION 1..13: note = Description of sequence: CDR3 from Table 9
CAVNAGNTGKLIF

SEQ ID NO: 3196 - protein, 11 aa, synthetic construct
  REGION 1..11: note = Description of sequence: CDR3 from Table 9
CAVSNDYKLSF

SEQ ID NO: 3197 - protein, 13 aa, synthetic construct
  REGION 1..13: note = Description of sequence: CDR3 from Table 9
CAVQGGGADGLTF

SEQ ID NO: 3198 - protein, 12 aa, synthetic construct
  REGION 1..12: note = Description of sequence: CDR3 from Table 9
CAVIANNNDMRF

SEQ ID NO: 3199 - protein, 7 aa, synthetic construct
  REGION 1..7: note = Description of sequence: CDR3 from Table 9
QGGKLIF

SEQ ID NO: 3200 - protein, 13 aa, synthetic construct
  REGION 1..13: note = Description of sequence: CDR3 from Table 9
CAAWNTGFQKLVF

SEQ ID NO: 3201 - protein, 12 aa, synthetic construct
  REGION 1..12: note = Description of sequence: CDR3 from Table 9
CAVNVNDYKLSF

SEQ ID NO: 3202 - protein, 15 aa, synthetic construct
  REGION 1..15: note = Description of sequence: CDR3 from Table 9
CAASWEQGSNYKLTF

SEQ ID NO: 3203 - protein, 14 aa, synthetic construct
  REGION 1..14: note = Description of sequence: CDR3 from Table 9
CAPSAGGGSEKLVF

SEQ ID NO: 3204 - protein, 14 aa, synthetic construct
  REGION 1..14: note = Description of sequence: CDR3 from Table 9
CALSDPGFGNVLHC

SEQ ID NO: 3205 - protein, 5 aa, synthetic construct
  REGION 1..5: note = Description of sequence: CDR3 from Table 9
YQLTF

SEQ ID NO: 3206 - protein, 13 aa, synthetic construct
  REGION 1..13: note = Description of sequence: CDR3 from Table 9
CAVRSYNTDKLIF

SEQ ID NO: 3207 - protein, 15 aa, synthetic construct
  REGION 1..15: note = Description of sequence: CDR3 from Table 9
CAVDETTDSWGKLQF

SEQ ID NO: 3208 - protein, 13 aa, synthetic construct
  REGION 1..13: note = Description of sequence: CDR3 from Table 9
CAHLSGGYNKLIF

SEQ ID NO: 3209 - protein, 14 aa, synthetic construct
  REGION 1..14: note = Description of sequence: CDR3 from Table 9
CATDANNAGNMLTF

SEQ ID NO: 3210 - protein, 14 aa, synthetic construct
  REGION 1..14: note = Description of sequence: CDR3 from Table 9
CALSEEADNNDMRF

SEQ ID NO: 3211 - protein, 17 aa, synthetic construct
  REGION 1..17: note = Description of sequence: CDR3 from Table 9
CAYRRMVSGGSNYKLTF

SEQ ID NO: 3212 - protein, 12 aa, synthetic construct
  REGION 1..12: note = Description of sequence: CDR3 from Table 9
CAYREGAQKLVF

SEQ ID NO: 3213 - protein, 12 aa, synthetic construct
  REGION 1..12: note = Description of sequence: CDR3 from Table 9
CAVGSPDYKLSF

SEQ ID NO: 3214 - protein, 13 aa, synthetic construct
  REGION 1..13: note = Description of sequence: CDR3 from Table 9
CAVVQTSGSRLTF

SEQ ID NO: 3215 - protein, 17 aa, synthetic construct
  REGION 1..17: note = Description of sequence: CDR3 from Table 9
CATDAWGHGGSQGNLIF

SEQ ID NO: 3216 - protein, 11 aa, synthetic construct
  REGION 1..11: note = Description of sequence: CDR3 from Table 9
CAYRSDGDMRF

SEQ ID NO: 3217 - protein, 14 aa, synthetic construct
  REGION 1..14: note = Description of sequence: CDR3 from Table 9
CAVRDGGSASKIIF

SEQ ID NO: 3218 - protein, 13 aa, synthetic construct
  REGION 1..13: note = Description of sequence: CDR3 from Table 9
CAMRERGYSTLTF

SEQ ID NO: 3219 - protein, 15 aa, synthetic construct
  REGION 1..15: note = Description of sequence: CDR3 from Table 9
CAMSLSNFGNEKLTF

SEQ ID NO: 3220 - protein, 13 aa, synthetic construct
  REGION 1..13: note = Description of sequence: CDR3 from Table 9
CAVVKTSYDKVIF

SEQ ID NO: 3221 - protein, 14 aa, synthetic construct
  REGION 1..14: note = Description of sequence: CDR3 from Table 9
CAVPRNSGNTPLVF

SEQ ID NO: 3222 - protein, 13 aa, synthetic construct
  REGION 1..13: note = Description of sequence: CDR3 from Table 9
CAVNDGTASKLTF

SEQ ID NO: 3223 - protein, 10 aa, synthetic construct
  REGION 1..10: note = Description of sequence: CDR3 from Table 9
CAVTVDDMRF

SEQ ID NO: 3224 - protein, 15 aa, synthetic construct
  REGION 1..15: note = Description of sequence: CDR3 from Table 9
CAVSLLSGGYNKLIF

SEQ ID NO: 3225 - protein, 12 aa, synthetic construct
  REGION 1..12: note = Description of sequence: CDR3 from Table 9
CAESLDTDKLIF

SEQ ID NO: 3226 - protein, 10 aa, synthetic construct
  REGION 1..10: note = Description of sequence: CDR3 from Table 9
CAVDNARLMF

SEQ ID NO: 3227 - protein, 14 aa, synthetic construct
  REGION 1..14: note = Description of sequence: CDR3 from Table 9
CAVNGGGSQGNLIF

SEQ ID NO: 3228 - protein, 17 aa, synthetic construct
  REGION 1..17: note = Description of sequence: CDR3 from Table 9
CALSEIVPTSGTYKYIF

SEQ ID NO: 3229 - protein, 15 aa, synthetic construct
  REGION 1..15: note = Description of sequence: CDR3 from Table 9
CLVGDSWNYGQNFVF

SEQ ID NO: 3230 - protein, 11 aa, synthetic construct
  REGION 1..11: note = Description of sequence: CDR3 from Table 9
CAMGSGYALNF

SEQ ID NO: 3231 - protein, 12 aa, synthetic construct
  REGION 1..12: note = Description of sequence: CDR3 from Table 9
CAVRDYGQKLLF

SEQ ID NO: 3232 - protein, 11 aa, synthetic construct
  REGION 1..11: note = Description of sequence: CDR3 from Table 9
CAVTPGTALIF

SEQ ID NO: 3233 - protein, 10 aa, synthetic construct
  REGION 1..10: note = Description of sequence: CDR3 from Table 9
CAVKGNDMRF

SEQ ID NO: 3234 - protein, 13 aa, synthetic construct
  REGION 1..13: note = Description of sequence: CDR3 from Table 9
CAVFMEYGNKLVF

SEQ ID NO: 3235 - protein, 13 aa, synthetic construct
  REGION 1..13: note = Description of sequence: CDR3 from Table 9
CGTGGAGDYKLSF

SEQ ID NO: 3236 - protein, 11 aa, synthetic construct
  REGION 1..11: note = Description of sequence: CDR3 from Table 9
CAPFNTDKLIF

SEQ ID NO: 3237 - protein, 11 aa, synthetic construct
  REGION 1..11: note = Description of sequence: CDR3 from Table 9
CAVRVGGDMRF

SEQ ID NO: 3238 - protein, 14 aa, synthetic construct
  REGION 1..14: note = Description of sequence: CDR3 from Table 9
CAVDLEVGGNKLVF

SEQ ID NO: 3239 - protein, 15 aa, synthetic construct
  REGION 1..15: note = Description of sequence: CDR3 from Table 9
CAMRELLFGNEKLTF

SEQ ID NO: 3240 - protein, 13 aa, synthetic construct
  REGION 1..13: note = Description of sequence: CDR3 from Table 9
CAYSPYNNNDMRF

SEQ ID NO: 3241 - protein, 14 aa, synthetic construct
  REGION 1..14: note = Description of sequence: CDR3 from Table 9
CASYSGGGADGLTF

SEQ ID NO: 3242 - protein, 14 aa, synthetic construct
  REGION 1..14: note = Description of sequence: CDR3 from Table 9
CAMREGPGNTPLVF

SEQ ID NO: 3243 - protein, 12 aa, synthetic construct
  REGION 1..12: note = Description of sequence: CDR3 from Table 9
CAVRPDGYALNF

SEQ ID NO: 3244 - protein, 16 aa, synthetic construct
  REGION 1..16: note = Description of sequence: CDR3 from Table 9
CAVISTGGTSYGKLTF

SEQ ID NO: 3245 - protein, 12 aa, synthetic construct
  REGION 1..12: note = Description of sequence: CDR3 from Table 9
CAVGEDGQNFVF

SEQ ID NO: 3246 - protein, 15 aa, synthetic construct
  REGION 1..15: note = Description of sequence: CDR3 from Table 9
CAVAGVISGTYKYIF

SEQ ID NO: 3247 - protein, 12 aa, synthetic construct
  REGION 1..12: note = Description of sequence: CDR3 from Table 9
CAERDGGFKTIF

SEQ ID NO: 3248 - protein, 13 aa, synthetic construct
  REGION 1..13: note = Description of sequence: CDR3 from Table 9
CAVIWYNNNDMRF

SEQ ID NO: 3249 - protein, 15 aa, synthetic construct
  REGION 1..15: note = Description of sequence: CDR3 from Table 9
CALSDPLGRDDKIIF

SEQ ID NO: 3250 - protein, 12 aa, synthetic construct
  REGION 1..12: note = Description of sequence: CDR3 from Table 9
CAPPRRDDKIIF

SEQ ID NO: 3251 - protein, 11 aa, synthetic construct
  REGION 1..11: note = Description of sequence: CDR3 from Table 9
CAVNRDDKIIF

SEQ ID NO: 3252 - protein, 13 aa, synthetic construct
  REGION 1..13: note = Description of sequence: CDR3 from Table 9
CAMGDNYGQNFVF

SEQ ID NO: 3253 - protein, 13 aa, synthetic construct
  REGION 1..13: note = Description of sequence: CDR3 from Table 9
CAMKGAGSYQLTF

SEQ ID NO: 3254 - protein, 10 aa, synthetic construct
  REGION 1..10: note = Description of sequence: CDR3 from Table 9
CASRPDKLIF

SEQ ID NO: 3255 - protein, 13 aa, synthetic construct
  REGION 1..13: note = Description of sequence: CDR3 from Table 9
CAVTDNYGQNFVF

SEQ ID NO: 3256 - protein, 10 aa, synthetic construct
  REGION 1..10: note = Description of sequence: CDR3 from Table 9
CAMREGDVSF

SEQ ID NO: 3257 - protein, 10 aa, synthetic construct
  REGION 1..10: note = Description of sequence: CDR3 from Table 9
CALNNARLMF

SEQ ID NO: 3258 - protein, 13 aa, synthetic construct
  REGION 1..13: note = Description of sequence: CDR3 from Table 9
CAVNRDSGYALNF

SEQ ID NO: 3259 - protein, 13 aa, synthetic construct
  REGION 1..13: note = Description of sequence: CDR3 from Table 9
CAVTTDSWGKLQF

SEQ ID NO: 3260 - protein, 14 aa, synthetic construct
  REGION 1..14: note = Description of sequence: CDR3 from Table 9
CLVARSYNNNDMRF

SEQ ID NO: 3261 - protein, 13 aa, synthetic construct
  REGION 1..13: note = Description of sequence: CDR3 from Table 9
CAVRGSGTYKYIF

SEQ ID NO: 3262 - protein, 9 aa, synthetic construct
  REGION 1..9: note = Description of sequence: CDR3 from Table 9
CGAGNMLTF

SEQ ID NO: 3263 - protein, 11 aa, synthetic construct
  REGION 1..11: note = Description of sequence: CDR3 from Table 9
CAFAGTYKYIF

SEQ ID NO: 3264 - protein, 12 aa, synthetic construct
  REGION 1..12: note = Description of sequence: CDR3 from Table 9
CAYRTSYDKVIF

SEQ ID NO: 3265 - protein, 13 aa, synthetic construct
  REGION 1..13: note = Description of sequence: CDR3 from Table 9
CAAMGDSSYKLIF

SEQ ID NO: 3266 - protein, 17 aa, synthetic construct
  REGION 1..17: note = Description of sequence: CDR3 from Table 9
CAMSTLDQIQGAQKLVF

SEQ ID NO: 3267 - protein, 12 aa, synthetic construct
  REGION 1..12: note = Description of sequence: CDR3 from Table 9
CAAAPNDYKLSF

SEQ ID NO: 3268 - protein, 13 aa, synthetic construct
  REGION 1..13: note = Description of sequence: CDR3 from Table 9
CAVNPGSQGNLIF

SEQ ID NO: 3269 - protein, 16 aa, synthetic construct
  REGION 1..16: note = Description of sequence: CDR3 from Table 9
CILRDSSGGGADGLTF

SEQ ID NO: 3270 - protein, 15 aa, synthetic construct
  REGION 1..15: note = Description of sequence: CDR3 from Table 9
CAVDMRADSNYQLIW

SEQ ID NO: 3271 - protein, 15 aa, synthetic construct
  REGION 1..15: note = Description of sequence: CDR3 from Table 9
CAGRSTGAGSYQLTF

SEQ ID NO: 3272 - protein, 13 aa, synthetic construct
  REGION 1..13: note = Description of sequence: CDR3 from Table 9
CALSDRGAQKLVF

SEQ ID NO: 3273 - protein, 14 aa, synthetic construct
  REGION 1..14: note = Description of sequence: CDR3 from Table 9
CAVSPLDGYNKLIF

SEQ ID NO: 3274 - protein, 10 aa, synthetic construct
  REGION 1..10: note = Description of sequence: CDR3 from Table 9
PYSSASKIIF

SEQ ID NO: 3275 - protein, 14 aa, synthetic construct
  REGION 1..14: note = Description of sequence: CDR3 from Table 9
CIVRLSNTGNQFYF

SEQ ID NO: 3276 - protein, 15 aa, synthetic construct
  REGION 1..15: note = Description of sequence: CDR3 from Table 9
CAARDPYNQGGKLIF

SEQ ID NO: 3277 - protein, 14 aa, synthetic construct
  REGION 1..14: note = Description of sequence: CDR3 from Table 9
CAVVLTDSWGKLQF

SEQ ID NO: 3278 - protein, 11 aa, synthetic construct
  REGION 1..11: note = Description of sequence: CDR3 from Table 9
CAVRPYDKVIF

SEQ ID NO: 3279 - protein, 15 aa, synthetic construct
  REGION 1..15: note = Description of sequence: CDR3 from Table 9
CAGLDQPGGSYIPTF

SEQ ID NO: 3280 - protein, 12 aa, synthetic construct
  REGION 1..12: note = Description of sequence: CDR3 from Table 9
CVVSGGYQKVTF

SEQ ID NO: 3281 - protein, 14 aa, synthetic construct
  REGION 1..14: note = Description of sequence: CDR3 from Table 9
CILNVPGGYQKVTF

SEQ ID NO: 3282 - protein, 15 aa, synthetic construct
  REGION 1..15: note = Description of sequence: CDR3 from Table 9
CAASPATSGTYKYIF

SEQ ID NO: 3283 - protein, 15 aa, synthetic construct
  REGION 1..15: note = Description of sequence: CDR3 from Table 9
CAVDRVTGGGNKLTF

SEQ ID NO: 3284 - protein, 14 aa, synthetic construct
  REGION 1..14: note = Description of sequence: CDR3 from Table 9
CLVVSNSSASKIIF

SEQ ID NO: 3285 - protein, 14 aa, synthetic construct
  REGION 1..14: note = Description of sequence: CDR3 from Table 9
CIVRAALYNNDMRF

SEQ ID NO: 3286 - protein, 14 aa, synthetic construct
  REGION 1..14: note = Description of sequence: CDR3 from Table 9
CAETVNTGFQKLVF

SEQ ID NO: 3287 - protein, 9 aa, synthetic construct
  REGION 1..9: note = Description of sequence: CDR3 from Table 9
CAANEKLVF

SEQ ID NO: 3288 - protein, 8 aa, synthetic construct
  REGION 1..8: note = Description of sequence: CDR3 from Table 9
CAVKGMRF

SEQ ID NO: 3289 - protein, 8 aa, synthetic construct
  REGION 1..8: note = Description of sequence: CDR3 from Table 9
CAGTHMRF

SEQ ID NO: 3290 - protein, 16 aa, synthetic construct
  REGION 1..16: note = Description of sequence: CDR3 from Table 9
CAILPDSGAGSYQLTF

SEQ ID NO: 3291 - protein, 15 aa, synthetic construct
  REGION 1..15: note = Description of sequence: CDR3 from Table 9
CGADNSGGGADGLTF

SEQ ID NO: 3292 - protein, 14 aa, synthetic construct
  REGION 1..14: note = Description of sequence: CDR3 from Table 9
CATDALSGTYKYIF

SEQ ID NO: 3293 - protein, 14 aa, synthetic construct
  REGION 1..14: note = Description of sequence: CDR3 from Table 9
CAMRESYNNNDMRF

SEQ ID NO: 3294 - protein, 12 aa, synthetic construct
  REGION 1..12: note = Description of sequence: CDR3 from Table 9
CALNNAGNMLTF

SEQ ID NO: 3295 - protein, 15 aa, synthetic construct
  REGION 1..15: note = Description of sequence: CDR3 from Table 9
CAVINSGAGSYQLTF

SEQ ID NO: 3296 - protein, 10 aa, synthetic construct
  REGION 1..10: note = Description of sequence: CDR3 from Table 9
CAYRTQKLVF

SEQ ID NO: 3297 - protein, 15 aa, synthetic construct
  REGION 1..15: note = Description of sequence: CDR3 from Table 9
CALILTQGGSEKLVF

SEQ ID NO: 3298 - protein, 13 aa, synthetic construct
  REGION 1..13: note = Description of sequence: CDR3 from Table 9
CARITGGGNKLTF

SEQ ID NO: 3299 - protein, 14 aa, synthetic construct
  REGION 1..14: note = Description of sequence: CDR3 from Table 9
CAVNALYNFNKFYF

SEQ ID NO: 3300 - protein, 12 aa, synthetic construct
  REGION 1..12: note = Description of sequence: CDR3 from Table 9
CAYGTGANNLFF

SEQ ID NO: 3301 - protein, 10 aa, synthetic construct
  REGION 1..10: note = Description of sequence: CDR3 from Table 9
CAVSADKLIF

SEQ ID NO: 3302 - protein, 16 aa, synthetic construct
  REGION 1..16: note = Description of sequence: CDR3 from Table 9
CAMRAITQGGSERLVF

SEQ ID NO: 3303 - protein, 12 aa, synthetic construct
  REGION 1..12: note = Description of sequence: CDR3 from Table 9
CATDQGNTPLVF

SEQ ID NO: 3304 - protein, 10 aa, synthetic construct
  REGION 1..10: note = Description of sequence: CDR3 from Table 9
CAYIGYDMRF

SEQ ID NO: 3305 - protein, 12 aa, synthetic construct
  REGION 1..12: note = Description of sequence: CDR3 from Table 9
CAIADSWGKLQF

SEQ ID NO: 3306 - protein, 14 aa, synthetic construct
  REGION 1..14: note = Description of sequence: CDR3 from Table 9
CALSEQTSYDKVIF

SEQ ID NO: 3307 - protein, 17 aa, synthetic construct
  REGION 1..17: note = Description of sequence: CDR3 from Table 9
CAPTRNAGGTSYGKLTF

SEQ ID NO: 3308 - protein, 12 aa, synthetic construct
  REGION 1..12: note = Description of sequence: CDR3 from Table 9
CVVKGGYNKLIF

SEQ ID NO: 3309 - protein, 12 aa, synthetic construct
  REGION 1..12: note = Description of sequence: CDR3 from Table 9
CAVVHGGQNFVF

SEQ ID NO: 3310 - protein, 11 aa, synthetic construct
  REGION 1..11: note = Description of sequence: CDR3 from Table 9
CAMEGNEKLTF

SEQ ID NO: 3311 - protein, 11 aa, synthetic construct
  REGION 1..11: note = Description of sequence: CDR3 from Table 9
CAPHSNYQLIW

SEQ ID NO: 3312 - protein, 16 aa, synthetic construct
  REGION 1..16: note = Description of sequence: CDR3 from Table 9
CAVAPGSGGSNYKLTF

SEQ ID NO: 3313 - protein, 16 aa, synthetic construct
  REGION 1..16: note = Description of sequence: CDR3 from Table 9
CAMREVYNNAGNMLTF

SEQ ID NO: 3314 - protein, 11 aa, synthetic construct
  REGION 1..11: note = Description of sequence: CDR3 from Table 9
CALSGYSTLTF

SEQ ID NO: 3315 - protein, 12 aa, synthetic construct
  REGION 1..12: note = Description of sequence: CDR3 from Table 9
CAAENRDDKIIF

SEQ ID NO: 3316 - protein, 11 aa, synthetic construct
  REGION 1..11: note = Description of sequence: CDR3 from Table 9
CALKGNNRLAF

SEQ ID NO: 3317 - protein, 11 aa, synthetic construct
  REGION 1..11: note = Description of sequence: CDR3 from Table 9
CDPIPTRRLSF

SEQ ID NO: 3318 - protein, 14 aa, synthetic construct
  REGION 1..14: note = Description of sequence: CDR3 from Table 9
CAMSVGNAGNMLTF

SEQ ID NO: 3319 - protein, 12 aa, synthetic construct
  REGION 1..12: note = Description of sequence: CDR3 from Table 9
CLVSGGYNKLIF

SEQ ID NO: 3320 - protein, 11 aa, synthetic construct
  REGION 1..11: note = Description of sequence: CDR3 from Table 9
CAMRGYQKVTF

SEQ ID NO: 3321 - protein, 15 aa, synthetic construct
  REGION 1..15: note = Description of sequence: CDR3 from Table 9
CALSEASEYGNKLVF

SEQ ID NO: 3322 - protein, 13 aa, synthetic construct
  REGION 1..13: note = Description of sequence: CDR3 from Table 9
CATEVQGAQKLVF

SEQ ID NO: 3323 - protein, 13 aa, synthetic construct
  REGION 1..13: note = Description of sequence: CDR3 from Table 9
CATDAEGAQKLVF

SEQ ID NO: 3324 - protein, 10 aa, synthetic construct
  REGION 1..10: note = Description of sequence: CDR3 from Table 9
CAFRFNKFYF

SEQ ID NO: 3325 - protein, 12 aa, synthetic construct
  REGION 1..12: note = Description of sequence: CDR3 from Table 9
CAVLDGYNKLIF

SEQ ID NO: 3326 - protein, 11 aa, synthetic construct
  REGION 1..11: note = Description of sequence: CDR3 from Table 9
CAYRSAWDMRF

SEQ ID NO: 3327 - protein, 13 aa, synthetic construct
  REGION 1..13: note = Description of sequence: CDR3 from Table 9
CALSGGGADGLTF

SEQ ID NO: 3328 - protein, 12 aa, synthetic construct
  REGION 1..12: note = Description of sequence: CDR3 from Table 9
CVVSGGYNKLIF

SEQ ID NO: 3329 - protein, 11 aa, synthetic construct
  REGION 1..11: note = Description of sequence: CDR3 from Table 9
CAVNLYARLMF

SEQ ID NO: 3330 - protein, 11 aa, synthetic construct
  REGION 1..11: note = Description of sequence: CDR3 from Table 9
CVDGGYQKVTF

SEQ ID NO: 3331 - protein, 11 aa, synthetic construct
  REGION 1..11: note = Description of sequence: CDR3 from Table 9
CAVKNDYKLSF

SEQ ID NO: 3332 - protein, 14 aa, synthetic construct
  REGION 1..14: note = Description of sequence: CDR3 from Table 9
CAEAISGGYNKLIF

SEQ ID NO: 3333 - protein, 15 aa, synthetic construct
  REGION 1..15: note = Description of sequence: CDR3 from Table 9
CAVNKPNQAGTALIF

SEQ ID NO: 3334 - protein, 13 aa, synthetic construct
  REGION 1..13: note = Description of sequence: CDR3 from Table 9
CAVKNTGFQKLVF

SEQ ID NO: 3335 - protein, 15 aa, synthetic construct
  REGION 1..15: note = Description of sequence: CDR3 from Table 9
CAVSHLIAGGFKTIF

SEQ ID NO: 3336 - protein, 10 aa, synthetic construct
  REGION 1..10: note = Description of sequence: CDR3 from Table 9
CAVNEDKIIF

SEQ ID NO: 3337 - protein, 12 aa, synthetic construct
  REGION 1..12: note = Description of sequence: CDR3 from Table 9
CVVNGNNNDMRF

SEQ ID NO: 3338 - protein, 15 aa, synthetic construct
  REGION 1..15: note = Description of sequence: CDR3 from Table 9
CAVEGSNFGNEKLTF

SEQ ID NO: 3339 - protein, 10 aa, synthetic construct
  REGION 1..10: note = Description of sequence: CDR3 from Table 9
CAVSNNDMRF

SEQ ID NO: 3340 - protein, 13 aa, synthetic construct
  REGION 1..13: note = Description of sequence: CDR3 from Table 9
CAVLLSNDYKLSF

SEQ ID NO: 3341 - protein, 13 aa, synthetic construct
  REGION 1..13: note = Description of sequence: CDR3 from Table 9
CAMEDTNAGKSTF

SEQ ID NO: 3342 - protein, 17 aa, synthetic construct
  REGION 1..17: note = Description of sequence: CDR3 from Table 9
CALSDGEFYNQGGKLIF

SEQ ID NO: 3343 - protein, 11 aa, synthetic construct
  REGION 1..11: note = Description of sequence: CDR3 from Table 9
CVVILNARLMF

SEQ ID NO: 3344 - protein, 16 aa, synthetic construct
  REGION 1..16: note = Description of sequence: CDR3 from Table 9
CGTDNAGGTSYGKLTF

SEQ ID NO: 3345 - protein, 14 aa, synthetic construct
  REGION 1..14: note = Description of sequence: CDR3 from Table 9
CAASMGQAGTALIF

SEQ ID NO: 3346 - protein, 13 aa, synthetic construct
  REGION 1..13: note = Description of sequence: CDR3 from Table 9
CAVSGGGADGLTF

SEQ ID NO: 3347 - protein, 16 aa, synthetic construct
  REGION 1..16: note = Description of sequence: CDR3 from Table 9
CAMREGRDFGNEKLTF

SEQ ID NO: 3348 - protein, 12 aa, synthetic construct
  REGION 1..12: note = Description of sequence: CDR3 from Table 9
CATDAGDDKIIF

SEQ ID NO: 3349 - protein, 14 aa, synthetic construct
  REGION 1..14: note = Description of sequence: CDR3 from Table 9
CALSEWGSQGNLIF

SEQ ID NO: 3350 - protein, 15 aa, synthetic construct
  REGION 1..15: note = Description of sequence: CDR3 from Table 9
CAMREGGDSSYKLIF

SEQ ID NO: 3351 - protein, 13 aa, synthetic construct
  REGION 1..13: note = Description of sequence: CDR3 from Table 9
CALSEADDYKLSF

SEQ ID NO: 3352 - protein, 15 aa, synthetic construct
  REGION 1..15: note = Description of sequence: CDR3 from Table 9
CAVKSGAGFGNVLHC

SEQ ID NO: 3353 - protein, 16 aa, synthetic construct
  REGION 1..16: note = Description of sequence: CDR3 from Table 9
CAVNWNYGGSQGNLIF

SEQ ID NO: 3354 - protein, 13 aa, synthetic construct
  REGION 1..13: note = Description of sequence: CDR3 from Table 9
CAVEPGDDYKLSF

SEQ ID NO: 3355 - protein, 12 aa, synthetic construct
  REGION 1..12: note = Description of sequence: CDR3 from Table 9
CAVNQAGTALIF

SEQ ID NO: 3356 - protein, 16 aa, synthetic construct
  REGION 1..16: note = Description of sequence: CDR3 from Table 9
CVVNLNYGGSQGNLIF

SEQ ID NO: 3357 - protein, 13 aa, synthetic construct
  REGION 1..13: note = Description of sequence: CDR3 from Table 9
CAEGLEDTGKLIF

SEQ ID NO: 3358 - protein, 17 aa, synthetic construct
  REGION 1..17: note = Description of sequence: CDR3 from Table 9
CAMREAHDNFGNEKLTF

SEQ ID NO: 3359 - protein, 12 aa, synthetic construct
  REGION 1..12: note = Description of sequence: CDR3 from Table 9
CAVRDEDDKIIF

SEQ ID NO: 3360 - protein, 15 aa, synthetic construct
  REGION 1..15: note = Description of sequence: CDR3 from Table 9
CAVSARAFGNEKLTF

SEQ ID NO: 3361 - protein, 12 aa, synthetic construct
  REGION 1..12: note = Description of sequence: CDR3 from Table 9
CAVEDNFNKFYF

SEQ ID NO: 3362 - protein, 16 aa, synthetic construct
  REGION 1..16: note = Description of sequence: CDR3 from Table 9
CALSEAYSGSARQLTF

SEQ ID NO: 3363 - protein, 13 aa, synthetic construct
  REGION 1..13: note = Description of sequence: CDR3 from Table 9
CAVKSEYGNKLVF

SEQ ID NO: 3364 - protein, 15 aa, synthetic construct
  REGION 1..15: note = Description of sequence: CDR3 from Table 9
CALSEGNFGNEKLTF

SEQ ID NO: 3365 - protein, 15 aa, synthetic construct
  REGION 1..15: note = Description of sequence: CDR3 from Table 9
CAMRGGMDSSYKLIF

SEQ ID NO: 3366 - protein, 13 aa, synthetic construct
  REGION 1..13: note = Description of sequence: CDR3 from Table 9
CAVDGQAGTALIF

SEQ ID NO: 3367 - protein, 11 aa, synthetic construct
  REGION 1..11: note = Description of sequence: CDR3 from Table 9
CAMTSFQKLVF

SEQ ID NO: 3368 - protein, 16 aa, synthetic construct
  REGION 1..16: note = Description of sequence: CDR3 from Table 9
CAVRDTRSYNTDKLIF

SEQ ID NO: 3369 - protein, 15 aa, synthetic construct
  REGION 1..15: note = Description of sequence: CDR3 from Table 9
CIVRIIKAAGNKLTF

SEQ ID NO: 3370 - protein, 13 aa, synthetic construct
  REGION 1..13: note = Description of sequence: CDR3 from Table 9
CAMRESNNARLMF

SEQ ID NO: 3371 - protein, 15 aa, synthetic construct
  REGION 1..15: note = Description of sequence: CDR3 from Table 9
CAVEMTTDSWGKLQF

SEQ ID NO: 3372 - protein, 15 aa, synthetic construct
  REGION 1..15: note = Description of sequence: CDR3 from Table 9
CAMRELYTGGFKTIF

SEQ ID NO: 3373 - protein, 11 aa, synthetic construct
  REGION 1..11: note = Description of sequence: CDR3 from Table 9
CGMDSSYKLIF

SEQ ID NO: 3374 - protein, 13 aa, synthetic construct
  REGION 1..13: note = Description of sequence: CDR3 from Table 9
CAVWVGFGNVLHC

SEQ ID NO: 3375 - protein, 12 aa, synthetic construct
  REGION 1..12: note = Description of sequence: CDR3 from Table 9
CAGGDSWGKLQF

SEQ ID NO: 3376 - protein, 13 aa, synthetic construct
  REGION 1..13: note = Description of sequence: CDR3 from Table 9
CAVSGDAGNMLTF

SEQ ID NO: 3377 - protein, 11 aa, synthetic construct
  REGION 1..11: note = Description of sequence: CDR3 from Table 9
CAESMGNDMRF

SEQ ID NO: 3378 - protein, 10 aa, synthetic construct
  REGION 1..10: note = Description of sequence: CDR3 from Table 9
CAVNNARLMF

SEQ ID NO: 3379 - protein, 11 aa, synthetic construct
  REGION 1..11: note = Description of sequence: CDR3 from Table 9
CAGRGYSTLTF

SEQ ID NO: 3380 - protein, 13 aa, synthetic construct
  REGION 1..13: note = Description of sequence: CDR3 from Table 9
CAVTARSSYKLIF

SEQ ID NO: 3381 - protein, 12 aa, synthetic construct
  REGION 1..12: note = Description of sequence: CDR3 from Table 9
CAVGDSNYQLIW

SEQ ID NO: 3382 - protein, 13 aa, synthetic construct
  REGION 1..13: note = Description of sequence: CDR3 from Table 9
CAYRSFNNNDMRF

SEQ ID NO: 3383 - protein, 9 aa, synthetic construct
  REGION 1..9: note = Description of sequence: CDR3 from Table 9
CATDNDMRF

SEQ ID NO: 3384 - protein, 9 aa, synthetic construct
  REGION 1..9: note = Description of sequence: CDR3 from Table 9
CAPSLDMRF

SEQ ID NO: 3385 - protein, 17 aa, synthetic construct
  REGION 1..17: note = Description of sequence: CDR3 from Table 9
CLVGDGGVTGGGNKLTF

SEQ ID NO: 3386 - protein, 13 aa, synthetic construct
  REGION 1..13: note = Description of sequence: CDR3 from Table 9
CAESMERGDKLIF

SEQ ID NO: 3387 - protein, 12 aa, synthetic construct
  REGION 1..12: note = Description of sequence: CDR3 from Table 9
CAVVDSNYQLIW

SEQ ID NO: 3388 - protein, 16 aa, synthetic construct
  REGION 1..16: note = Description of sequence: CDR3 from Table 9
CAVYGDYGGSQGNLIF

SEQ ID NO: 3389 - protein, 15 aa, synthetic construct
  REGION 1..15: note = Description of sequence: CDR3 from Table 9
CALSEAEEYGNKLVF

SEQ ID NO: 3390 - protein, 13 aa, synthetic construct
  REGION 1..13: note = Description of sequence: CDR3 from Table 9
CAVKNTGRRALTF

SEQ ID NO: 3391 - protein, 13 aa, synthetic construct
  REGION 1..13: note = Description of sequence: CDR3 from Table 9
CAVQAFGNEKLTF

SEQ ID NO: 3392 - protein, 16 aa, synthetic construct
  REGION 1..16: note = Description of sequence: CDR3 from Table 9
CATGGVSNTNAGKSTF

SEQ ID NO: 3393 - protein, 15 aa, synthetic construct
  REGION 1..15: note = Description of sequence: CDR3 from Table 9
CALILTNFGNEKLTF

SEQ ID NO: 3394 - protein, 11 aa, synthetic construct
  REGION 1..11: note = Description of sequence: CDR3 from Table 9
CAASVGDMLTF

SEQ ID NO: 3395 - protein, 13 aa, synthetic construct
  REGION 1..13: note = Description of sequence: CDR3 from Table 9
CAVRDNNFNKFYF

SEQ ID NO: 3396 - protein, 12 aa, synthetic construct
  REGION 1..12: note = Description of sequence: CDR3 from Table 9
CAYMDSNYQLIW

SEQ ID NO: 3397 - protein, 11 aa, synthetic construct
  REGION 1..11: note = Description of sequence: CDR3 from Table 9
CAYNQGGKLIF

SEQ ID NO: 3398 - protein, 14 aa, synthetic construct
  REGION 1..14: note = Description of sequence: CDR3 from Table 9
CLVGYSGGYQKVTF

SEQ ID NO: 3399 - protein, 15 aa, synthetic construct
  REGION 1..15: note = Description of sequence: CDR3 from Table 9
CAVVYSGGGADGLTF

SEQ ID NO: 3400 - protein, 14 aa, synthetic construct
  REGION 1..14: note = Description of sequence: CDR3 from Table 9
CALTKETSGSRLTF

SEQ ID NO: 3401 - protein, 11 aa, synthetic construct
  REGION 1..11: note = Description of sequence: CDR3 from Table 9
CAVLNDYKLSF

SEQ ID NO: 3402 - protein, 12 aa, synthetic construct
  REGION 1..12: note = Description of sequence: CDR3 from Table 9
CLVGDPVDKIIF

SEQ ID NO: 3403 - protein, 15 aa, synthetic construct
  REGION 1..15: note = Description of sequence: CDR3 from Table 9
CATDEGGSTLGRLYF

SEQ ID NO: 3404 - protein, 14 aa, synthetic construct
  REGION 1..14: note = Description of sequence: CDR3 from Table 9
CVVTISGGYNKLIF

SEQ ID NO: 3405 - protein, 11 aa, synthetic construct
  REGION 1..11: note = Description of sequence: CDR3 from Table 9
CASGGGNMLTF

SEQ ID NO: 3406 - protein, 10 aa, synthetic construct
  REGION 1..10: note = Description of sequence: CDR3 from Table 9
CAGNNARLMF

SEQ ID NO: 3407 - protein, 15 aa, synthetic construct
  REGION 1..15: note = Description of sequence: CDR3 from Table 9
CALIYFSGGYNKLIF

SEQ ID NO: 3408 - protein, 12 aa, synthetic construct
  REGION 1..12: note = Description of sequence: CDR3 from Table 9
CICEGGSYIPTF

SEQ ID NO: 3409 - protein, 13 aa, synthetic construct
  REGION 1..13: note = Description of sequence: CDR3 from Table 9
CAVITGGGNKLTF

SEQ ID NO: 3410 - protein, 10 aa, synthetic construct
  REGION 1..10: note = Description of sequence: CDR3 from Table 9
CAMSGHDMRF

SEQ ID NO: 3411 - protein, 13 aa, synthetic construct
  REGION 1..13: note = Description of sequence: CDR3 from Table 9
CAVVRGDTDKLIF

SEQ ID NO: 3412 - protein, 13 aa, synthetic construct
  REGION 1..13: note = Description of sequence: CDR3 from Table 9
CAEETGGGNKLTF

SEQ ID NO: 3413 - protein, 13 aa, synthetic construct
  REGION 1..13: note = Description of sequence: CDR3 from Table 9
CAFIRGSQGNLIF

SEQ ID NO: 3414 - protein, 13 aa, synthetic construct
  REGION 1..13: note = Description of sequence: CDR3 from Table 9
CILSYNTGNQFYF

SEQ ID NO: 3415 - protein, 13 aa, synthetic construct
  REGION 1..13: note = Description of sequence: CDR3 from Table 9
CAPRGSGRRALTF

SEQ ID NO: 3416 - protein, 15 aa, synthetic construct
  REGION 1..15: note = Description of sequence: CDR3 from Table 9
CAGPHLSYNTDKLIF

SEQ ID NO: 3417 - protein, 12 aa, synthetic construct
  REGION 1..12: note = Description of sequence: CDR3 from Table 9
CAVGAGNNDMRF

SEQ ID NO: 3418 - protein, 16 aa, synthetic construct
  REGION 1..16: note = Description of sequence: CDR3 from Table 9
CAVPSRPNFGNEKLTF

SEQ ID NO: 3419 - protein, 14 aa, synthetic construct
  REGION 1..14: note = Description of sequence: CDR3 from Table 9
CALPDIQGAQKLVF

SEQ ID NO: 3420 - protein, 16 aa, synthetic construct
  REGION 1..16: note = Description of sequence: CDR3 from Table 9
CAMREDYGGSQGNLIF

SEQ ID NO: 3421 - protein, 13 aa, synthetic construct
  REGION 1..13: note = Description of sequence: CDR3 from Table 9
CIVRVGYNARLMF

SEQ ID NO: 3422 - protein, 13 aa, synthetic construct
  REGION 1..13: note = Description of sequence: CDR3 from Table 9
CGAVFLNDYKLSF

SEQ ID NO: 3423 - protein, 15 aa, synthetic construct
  REGION 1..15: note = Description of sequence: CDR3 from Table 9
CAVDIATFGNEKLTF

SEQ ID NO: 3424 - protein, 14 aa, synthetic construct
  REGION 1..14: note = Description of sequence: CDR3 from Table 9
STSFGSNYGQNFVF

SEQ ID NO: 3425 - protein, 12 aa, synthetic construct
  REGION 1..12: note = Description of sequence: CDR3 from Table 9
CVVLGGYNKLIF

SEQ ID NO: 3426 - protein, 13 aa, synthetic construct
  REGION 1..13: note = Description of sequence: CDR3 from Table 9
CALSEAGDYKLSF

SEQ ID NO: 3427 - protein, 12 aa, synthetic construct
  REGION 1..12: note = Description of sequence: CDR3 from Table 9
CAVYDNFNKFYF

SEQ ID NO: 3428 - protein, 15 aa, synthetic construct
  REGION 1..15: note = Description of sequence: CDR3 from Table 9
CALMMTTDSWGKLQF

SEQ ID NO: 3429 - protein, 13 aa, synthetic construct
  REGION 1..13: note = Description of sequence: CDR3 from Table 9
CACTGGGADGLTF

SEQ ID NO: 3430 - protein, 15 aa, synthetic construct
  REGION 1..15: note = Description of sequence: CDR3 from Table 9
CALNTIRDSNYQLIW

SEQ ID NO: 3431 - protein, 11 aa, synthetic construct
  REGION 1..11: note = Description of sequence: CDR3 from Table 9
CAVSEYDKIIF

SEQ ID NO: 3432 - protein, 13 aa, synthetic construct
  REGION 1..13: note = Description of sequence: CDR3 from Table 9
CAEIISSASKIIF

SEQ ID NO: 3433 - protein, 12 aa, synthetic construct
  REGION 1..12: note = Description of sequence: CDR3 from Table 9
CARLTGANNLFF

SEQ ID NO: 3434 - protein, 14 aa, synthetic construct
  REGION 1..14: note = Description of sequence: CDR3 from Table 9
CAVSPFSDGQKLLF

SEQ ID NO: 3435 - protein, 14 aa, synthetic construct
  REGION 1..14: note = Description of sequence: CDR3 from Table 9
CILRDMEYGNKLVF

SEQ ID NO: 3436 - protein, 10 aa, synthetic construct
  REGION 1..10: note = Description of sequence: CDR3 from Table 9
CAFNDYKLSF

SEQ ID NO: 3437 - protein, 17 aa, synthetic construct
  REGION 1..17: note = Description of sequence: CDR3 from Table 9
CAASRLPGYSSASKIIF

SEQ ID NO: 3438 - protein, 10 aa, synthetic construct
  REGION 1..10: note = Description of sequence: CDR3 from Table 9
CAMKDNDMRF

SEQ ID NO: 3439 - protein, 13 aa, synthetic construct
  REGION 1..13: note = Description of sequence: CDR3 from Table 9
CAVNSNSGYALNF

SEQ ID NO: 3440 - protein, 12 aa, synthetic construct
  REGION 1..12: note = Description of sequence: CDR3 from Table 9
CASSGGSYIPTF

SEQ ID NO: 3441 - protein, 10 aa, synthetic construct
  REGION 1..10: note = Description of sequence: CDR3 from Table 9
CAVNDYKLSF

SEQ ID NO: 3442 - protein, 15 aa, synthetic construct
  REGION 1..15: note = Description of sequence: CDR3 from Table 9
CAMREHGTAGNKLTF

SEQ ID NO: 3443 - protein, 14 aa, synthetic construct
  REGION 1..14: note = Description of sequence: CDR3 from Table 9
CAMRERTGGFKTIF

SEQ ID NO: 3444 - protein, 14 aa, synthetic construct
  REGION 1..14: note = Description of sequence: CDR3 from Table 9
CAVMTTDSWGKLQF

SEQ ID NO: 3445 - protein, 16 aa, synthetic construct
  REGION 1..16: note = Description of sequence: CDR3 from Table 9
CAMRETPQGGSEKLVF

SEQ ID NO: 3446 - protein, 11 aa, synthetic construct
  REGION 1..11: note = Description of sequence: CDR3 from Table 9
CAFINDYKLSF

SEQ ID NO: 3447 - protein, 13 aa, synthetic construct
  REGION 1..13: note = Description of sequence: CDR3 from Table 9
CAVSDTGGFKTIF

SEQ ID NO: 3448 - protein, 15 aa, synthetic construct
  REGION 1..15: note = Description of sequence: CDR3 from Table 9
CVVNMEGGGADGLTF

SEQ ID NO: 3449 - protein, 10 aa, synthetic construct
  REGION 1..10: note = Description of sequence: CDR3 from Table 9
CALSEDQFYF

SEQ ID NO: 3450 - protein, 14 aa, synthetic construct
  REGION 1..14: note = Description of sequence: CDR3 from Table 9
CAVRSGAGSYQLTF

SEQ ID NO: 3451 - protein, 14 aa, synthetic construct
  REGION 1..14: note = Description of sequence: CDR3 from Table 9
CASHGSSNTGKLIF

SEQ ID NO: 3452 - protein, 11 aa, synthetic construct
  REGION 1..11: note = Description of sequence: CDR3 from Table 9
CAGDSWGKLQF

SEQ ID NO: 3453 - protein, 12 aa, synthetic construct
  REGION 1..12: note = Description of sequence: CDR3 from Table 9
CARPPDDYKLSF

SEQ ID NO: 3454 - protein, 15 aa, synthetic construct
  REGION 1..15: note = Description of sequence: CDR3 from Table 9
CAFMKQSYRDDKIIF

SEQ ID NO: 3455 - protein, 8 aa, synthetic construct
  REGION 1..8: note = Description of sequence: CDR3 from Table 9
VLFRMLTF

SEQ ID NO: 3456 - protein, 10 aa, synthetic construct
  REGION 1..10: note = Description of sequence: CDR3 from Table 9
CAGFGNVLHC

SEQ ID NO: 3457 - protein, 15 aa, synthetic construct
  REGION 1..15: note = Description of sequence: CDR3 from Table 9
CALTASNQAGTALIF

SEQ ID NO: 3458 - protein, 14 aa, synthetic construct
  REGION 1..14: note = Description of sequence: CDR3 from Table 9
CAVTVVDNNARLMF

SEQ ID NO: 3459 - protein, 12 aa, synthetic construct
  REGION 1..12: note = Description of sequence: CDR3 from Table 9
CAVTPNFNKFYF

SEQ ID NO: 3460 - protein, 17 aa, synthetic construct
  REGION 1..17: note = Description of sequence: CDR3 from Table 9
CLVGDLTSFQGAQKLVF

SEQ ID NO: 3461 - protein, 16 aa, synthetic construct
  REGION 1..16: note = Description of sequence: CDR3 from Table 9
CALSMYSGGGADGLTF

SEQ ID NO: 3462 - protein, 11 aa, synthetic construct
  REGION 1..11: note = Description of sequence: CDR3 from Table 9
CAVRDYYQLIW

SEQ ID NO: 3463 - protein, 10 aa, synthetic construct
  REGION 1..10: note = Description of sequence: CDR3 from Table 9
CAVRGGKLTF

SEQ ID NO: 3464 - protein, 14 aa, synthetic construct
  REGION 1..14: note = Description of sequence: CDR3 from Table 9
CAVGEETSGSRLTF

SEQ ID NO: 3465 - protein, 13 aa, synthetic construct
  REGION 1..13: note = Description of sequence: CDR3 from Table 9
CAGADTNAGKSTF

SEQ ID NO: 3466 - protein, 15 aa, synthetic construct
  REGION 1..15: note = Description of sequence: CDR3 from Table 9
CAMREPYNAGNMLTF

SEQ ID NO: 3467 - protein, 13 aa, synthetic construct
  REGION 1..13: note = Description of sequence: CDR3 from Table 9
CAIPPSGTYKYIF

SEQ ID NO: 3468 - protein, 13 aa, synthetic construct
  REGION 1..13: note = Description of sequence: CDR3 from Table 9
CAVIDPARARLMF

SEQ ID NO: 3469 - protein, 12 aa, synthetic construct
  REGION 1..12: note = Description of sequence: CDR3 from Table 9
CAVGRYDYKLSF

SEQ ID NO: 3470 - protein, 14 aa, synthetic construct
  REGION 1..14: note = Description of sequence: CDR3 from Table 9
CAVGSQGGSEKLVF

SEQ ID NO: 3471 - protein, 12 aa, synthetic construct
  REGION 1..12: note = Description of sequence: CDR3 from Table 9
CAAKWGNNDMRF

SEQ ID NO: 3472 - protein, 14 aa, synthetic construct
  REGION 1..14: note = Description of sequence: CDR3 from Table 9
CAVQGYSNDYKLSF

SEQ ID NO: 3473 - protein, 15 aa, synthetic construct
  REGION 1..15: note = Description of sequence: CDR3 from Table 9
CAVNTFTGGGNKLTF

SEQ ID NO: 3474 - protein, 15 aa, synthetic construct
  REGION 1..15: note = Description of sequence: CDR3 from Table 9
CAVKAGNFGNEKLTF

SEQ ID NO: 3475 - protein, 11 aa, synthetic construct
  REGION 1..11: note = Description of sequence: CDR3 from Table 9
CAVNSGYALNF

SEQ ID NO: 3476 - protein, 12 aa, synthetic construct
  REGION 1..12: note = Description of sequence: CDR3 from Table 9
CAVSPGNTPLVF

SEQ ID NO: 3477 - protein, 17 aa, synthetic construct
  REGION 1..17: note = Description of sequence: CDR3 from Table 9
CAYRSFSNAGNNRKLIW

SEQ ID NO: 3478 - protein, 11 aa, synthetic construct
  REGION 1..11: note = Description of sequence: CDR3 from Table 9
CATEGSYIPTF

SEQ ID NO: 3479 - protein, 18 aa, synthetic construct
  REGION 1..18: note = Description of sequence: CDR3 from Table 9
CAYRSPFLRAGTASKLTF

SEQ ID NO: 3480 - protein, 14 aa, synthetic construct
  REGION 1..14: note = Description of sequence: CDR3 from Table 9
CALSEGERDDKIIF

SEQ ID NO: 3481 - protein, 11 aa, synthetic construct
  REGION 1..11: note = Description of sequence: CDR3 from Table 9
CAAIIGQKLLF

SEQ ID NO: 3482 - protein, 16 aa, synthetic construct
  REGION 1..16: note = Description of sequence: CDR3 from Table 9
CILRGIPRDSSYKLIF

SEQ ID NO: 3483 - protein, 16 aa, synthetic construct
  REGION 1..16: note = Description of sequence: CDR3 from Table 9
CAMREGRVFGNEKLTF

SEQ ID NO: 3484 - protein, 14 aa, synthetic construct
  REGION 1..14: note = Description of sequence: CDR3 from Table 9
CALSRGGGADGLTF

SEQ ID NO: 3485 - protein, 10 aa, synthetic construct
  REGION 1..10: note = Description of sequence: CDR3 from Table 9
CAGYDYKLSF

SEQ ID NO: 3486 - protein, 12 aa, synthetic construct
  REGION 1..12: note = Description of sequence: CDR3 from Table 9
CAGGTGYNKLIF

SEQ ID NO: 3487 - protein, 13 aa, synthetic construct
  REGION 1..13: note = Description of sequence: CDR3 from Table 9
CAIIRFGNEKLTF

SEQ ID NO: 3488 - protein, 15 aa, synthetic construct
  REGION 1..15: note = Description of sequence: CDR3 from Table 9
CLLLNYGGSQGNLIF

SEQ ID NO: 3489 - protein, 16 aa, synthetic construct
  REGION 1..16: note = Description of sequence: CDR3 from Table 9
CAVSVGVKYNFNKFYF

SEQ ID NO: 3490 - protein, 15 aa, synthetic construct
  REGION 1..15: note = Description of sequence: CDR3 from Table 9
CASSFLGTGLNEQYF

SEQ ID NO: 3491 - protein, 12 aa, synthetic construct
  REGION 1..12: note = Description of sequence: CDR3 from Table 9
CASSYSWGEQFF

SEQ ID NO: 3492 - protein, 14 aa, synthetic construct
  REGION 1..14: note = Description of sequence: CDR3 from Table 9
CASTHWERVDEQFF

SEQ ID NO: 3493 - protein, 13 aa, synthetic construct
  REGION 1..13: note = Description of sequence: CDR3 from Table 9
CASSYGVNTEAFF

SEQ ID NO: 3494 - protein, 12 aa, synthetic construct
  REGION 1..12: note = Description of sequence: CDR3 from Table 9
CAISRGDTEAFF

SEQ ID NO: 3495 - protein, 15 aa, synthetic construct
  REGION 1..15: note = Description of sequence: CDR3 from Table 9
CATSAKTRLNTEAFF

SEQ ID NO: 3496 - protein, 15 aa, synthetic construct
  REGION 1..15: note = Description of sequence: CDR3 from Table 9
CASSKGQGANYGYTF

SEQ ID NO: 3497 - protein, 14 aa, synthetic construct
  REGION 1..14: note = Description of sequence: CDR3 from Table 9
CASSLIDSPYEQYF

SEQ ID NO: 3498 - protein, 13 aa, synthetic construct
  REGION 1..13: note = Description of sequence: CDR3 from Table 9
CASSLGPNSPLHF

SEQ ID NO: 3499 - protein, 10 aa, synthetic construct
  REGION 1..10: note = Description of sequence: CDR3 from Table 9
CASGSYEQYF

SEQ ID NO: 3500 - protein, 17 aa, synthetic construct
  REGION 1..17: note = Description of sequence: CDR3 from Table 9
CASSSQTGPYSNQPQHF

SEQ ID NO: 3501 - protein, 15 aa, synthetic construct
  REGION 1..15: note = Description of sequence: CDR3 from Table 9
CASRDSVGGGEGYTF

SEQ ID NO: 3502 - protein, 14 aa, synthetic construct
  REGION 1..14: note = Description of sequence: CDR3 from Table 9
CASSVTGRWVPLHF

SEQ ID NO: 3503 - protein, 19 aa, synthetic construct
  REGION 1..19: note = Description of sequence: CDR3 from Table 9
CASSQNGSEAAYSNQPQHF

SEQ ID NO: 3504 - protein, 12 aa, synthetic construct
  REGION 1..12: note = Description of sequence: CDR3 from Table 9
CSATGQNYEQYF

SEQ ID NO: 3505 - protein, 18 aa, synthetic construct
  REGION 1..18: note = Description of sequence: CDR3 from Table 9
CASSIGTVNRGPNTEAFF

SEQ ID NO: 3506 - protein, 13 aa, synthetic construct
  REGION 1..13: note = Description of sequence: CDR3 from Table 9
CASSWQGSNIQYF

SEQ ID NO: 3507 - protein, 14 aa, synthetic construct
  REGION 1..14: note = Description of sequence: CDR3 from Table 9
CASSPITNTGELFF

SEQ ID NO: 3508 - protein, 13 aa, synthetic construct
  REGION 1..13: note = Description of sequence: CDR3 from Table 9
CSATLDRNYGYTF

SEQ ID NO: 3509 - protein, 15 aa, synthetic construct
  REGION 1..15: note = Description of sequence: CDR3 from Table 9
CASSLETGGWETQYF

SEQ ID NO: 3510 - protein, 13 aa, synthetic construct
  REGION 1..13: note = Description of sequence: CDR3 from Table 9
CASSLNMNTEAFF

SEQ ID NO: 3511 - protein, 15 aa, synthetic construct
  REGION 1..15: note = Description of sequence: CDR3 from Table 9
CASSIDRTVGNTIYF

SEQ ID NO: 3512 - protein, 12 aa, synthetic construct
  REGION 1..12: note = Description of sequence: CDR3 from Table 9
CSARDWGYEQYF

SEQ ID NO: 3513 - protein, 13 aa, synthetic construct
  REGION 1..13: note = Description of sequence: CDR3 from Table 9
CASSFGSGGALYF

SEQ ID NO: 3514 - protein, 13 aa, synthetic construct
  REGION 1..13: note = Description of sequence: CDR3 from Table 9
CASSFLLYNEQFF

SEQ ID NO: 3515 - protein, 15 aa, synthetic construct
  REGION 1..15: note = Description of sequence: CDR3 from Table 9
CASSEMDGSNQPQHF

SEQ ID NO: 3516 - protein, 13 aa, synthetic construct
  REGION 1..13: note = Description of sequence: CDR3 from Table 9
CSVRLTDYNEQFF

SEQ ID NO: 3517 - protein, 15 aa, synthetic construct
  REGION 1..15: note = Description of sequence: CDR3 from Table 9
CASSGSGASTDTQYF

SEQ ID NO: 3518 - protein, 14 aa, synthetic construct
  REGION 1..14: note = Description of sequence: CDR3 from Table 9
CASSLGPGGASYTF

SEQ ID NO: 3519 - protein, 15 aa, synthetic construct
  REGION 1..15: note = Description of sequence: CDR3 from Table 9
CASSETSLFTHGYTF

SEQ ID NO: 3520 - protein, 13 aa, synthetic construct
  REGION 1..13: note = Description of sequence: CDR3 from Table 9
CAWSSSVNTEAFF

SEQ ID NO: 3521 - protein, 13 aa, synthetic construct
  REGION 1..13: note = Description of sequence: CDR3 from Table 9
CASSPMTGAEQFF

SEQ ID NO: 3522 - protein, 15 aa, synthetic construct
  REGION 1..15: note = Description of sequence: CDR3 from Table 9
CASSLGGLVYNEQFF

SEQ ID NO: 3523 - protein, 13 aa, synthetic construct
  REGION 1..13: note = Description of sequence: CDR3 from Table 9
CASSFSGGNEQFF

SEQ ID NO: 3524 - protein, 13 aa, synthetic construct
  REGION 1..13: note = Description of sequence: CDR3 from Table 9
CASTSGAYNEQFF

SEQ ID NO: 3525 - protein, 17 aa, synthetic construct
  REGION 1..17: note = Description of sequence: CDR3 from Table 9
CASSYQTGPYSNQPQHF

SEQ ID NO: 3526 - protein, 14 aa, synthetic construct
  REGION 1..14: note = Description of sequence: CDR3 from Table 9
CASSWVGGADTQYF

SEQ ID NO: 3527 - protein, 15 aa, synthetic construct
  REGION 1..15: note = Description of sequence: CDR3 from Table 9
CASSQDLGTGNTIYF

SEQ ID NO: 3528 - protein, 13 aa, synthetic construct
  REGION 1..13: note = Description of sequence: CDR3 from Table 9
CSASDSLTISGFF

SEQ ID NO: 3529 - protein, 15 aa, synthetic construct
  REGION 1..15: note = Description of sequence: CDR3 from Table 9
CASSLLGQTNYGYTF

SEQ ID NO: 3530 - protein, 15 aa, synthetic construct
  REGION 1..15: note = Description of sequence: CDR3 from Table 9
CASSEGQGRWYEQYF

SEQ ID NO: 3531 - protein, 12 aa, synthetic construct
  REGION 1..12: note = Description of sequence: CDR3 from Table 9
CASSVGSTEAFF

SEQ ID NO: 3532 - protein, 14 aa, synthetic construct
  REGION 1..14: note = Description of sequence: CDR3 from Table 9
CASSPWEMNTEAFF

SEQ ID NO: 3533 - protein, 15 aa, synthetic construct
  REGION 1..15: note = Description of sequence: CDR3 from Table 9
CSASVSGGPLDTQYF

SEQ ID NO: 3534 - protein, 15 aa, synthetic construct
  REGION 1..15: note = Description of sequence: CDR3 from Table 9
CASSLGPMEENIQYF

SEQ ID NO: 3535 - protein, 12 aa, synthetic construct
  REGION 1..12: note = Description of sequence: CDR3 from Table 9
CASSSDRGEQFF

SEQ ID NO: 3536 - protein, 14 aa, synthetic construct
  REGION 1..14: note = Description of sequence: CDR3 from Table 9
CASSEVEGPGELFF

SEQ ID NO: 3537 - protein, 14 aa, synthetic construct
  REGION 1..14: note = Description of sequence: CDR3 from Table 9
CASSLSGFGNTIYF

SEQ ID NO: 3538 - protein, 20 aa, synthetic construct
  REGION 1..20: note = Description of sequence: CDR3 from Table 9
CASSQGGQDGHGTTNEKLFF

SEQ ID NO: 3539 - protein, 16 aa, synthetic construct
  REGION 1..16: note = Description of sequence: CDR3 from Table 9
CASSLGGGGPQETQYF

SEQ ID NO: 3540 - protein, 14 aa, synthetic construct
  REGION 1..14: note = Description of sequence: CDR3 from Table 9
CATSRTDISYEQYF

SEQ ID NO: 3541 - protein, 14 aa, synthetic construct
  REGION 1..14: note = Description of sequence: CDR3 from Table 9
CASSYYGTTDEQYF

SEQ ID NO: 3542 - protein, 14 aa, synthetic construct
  REGION 1..14: note = Description of sequence: CDR3 from Table 9
CASSLGPSLYEQYF

SEQ ID NO: 3543 - protein, 15 aa, synthetic construct
  REGION 1..15: note = Description of sequence: CDR3 from Table 9
CASSWGSSPAETQYF

SEQ ID NO: 3544 - protein, 16 aa, synthetic construct
  REGION 1..16: note = Description of sequence: CDR3 from Table 9
CASSDQGALSSYEQYF

SEQ ID NO: 3545 - protein, 15 aa, synthetic construct
  REGION 1..15: note = Description of sequence: CDR3 from Table 9
CASSRIANNNNEQFF

SEQ ID NO: 3546 - protein, 15 aa, synthetic construct
  REGION 1..15: note = Description of sequence: CDR3 from Table 9
CSVPVFGRGTGELFF

SEQ ID NO: 3547 - protein, 14 aa, synthetic construct
  REGION 1..14: note = Description of sequence: CDR3 from Table 9
CASSLWGTYNEQFF

SEQ ID NO: 3548 - protein, 13 aa, synthetic construct
  REGION 1..13: note = Description of sequence: CDR3 from Table 9
CASSQADHYEQYF

SEQ ID NO: 3549 - protein, 11 aa, synthetic construct
  REGION 1..11: note = Description of sequence: CDR3 from Table 9
CASSLFNEQFF

SEQ ID NO: 3550 - protein, 13 aa, synthetic construct
  REGION 1..13: note = Description of sequence: CDR3 from Table 9
CASSFGGASEAFF

SEQ ID NO: 3551 - protein, 12 aa, synthetic construct
  REGION 1..12: note = Description of sequence: CDR3 from Table 9
CASSVGNTEAFF

SEQ ID NO: 3552 - protein, 13 aa, synthetic construct
  REGION 1..13: note = Description of sequence: CDR3 from Table 9
CASSPILTYEQYF

SEQ ID NO: 3553 - protein, 14 aa, synthetic construct
  REGION 1..14: note = Description of sequence: CDR3 from Table 9
CASSMAGSSYEQYF

SEQ ID NO: 3554 - protein, 14 aa, synthetic construct
  REGION 1..14: note = Description of sequence: CDR3 from Table 9
CASSLAQSDSLAFF

SEQ ID NO: 3555 - protein, 14 aa, synthetic construct
  REGION 1..14: note = Description of sequence: CDR3 from Table 9
CASSLQGSDNEQFF

SEQ ID NO: 3556 - protein, 14 aa, synthetic construct
  REGION 1..14: note = Description of sequence: CDR3 from Table 9
CSARDLTVAETQYF

SEQ ID NO: 3557 - protein, 12 aa, synthetic construct
  REGION 1..12: note = Description of sequence: CDR3 from Table 9
CASSSGGAWYTF

SEQ ID NO: 3558 - protein, 14 aa, synthetic construct
  REGION 1..14: note = Description of sequence: CDR3 from Table 9
CASSPRGVGTEAFF

SEQ ID NO: 3559 - protein, 16 aa, synthetic construct
  REGION 1..16: note = Description of sequence: CDR3 from Table 9
CASSPSSGGITDTQYF

SEQ ID NO: 3560 - protein, 17 aa, synthetic construct
  REGION 1..17: note = Description of sequence: CDR3 from Table 9
CASSEQGGERRNTEAFF

SEQ ID NO: 3561 - protein, 14 aa, synthetic construct
  REGION 1..14: note = Description of sequence: CDR3 from Table 9
CASSQGWGVETQYF

SEQ ID NO: 3562 - protein, 15 aa, synthetic construct
  REGION 1..15: note = Description of sequence: CDR3 from Table 9
CASSYSTGGTDTQYF

SEQ ID NO: 3563 - protein, 16 aa, synthetic construct
  REGION 1..16: note = Description of sequence: CDR3 from Table 9
CASSRTQGYSNQPQHF

SEQ ID NO: 3564 - protein, 15 aa, synthetic construct
  REGION 1..15: note = Description of sequence: CDR3 from Table 9
CASSIFTRRGYEQYF

SEQ ID NO: 3565 - protein, 15 aa, synthetic construct
  REGION 1..15: note = Description of sequence: CDR3 from Table 9
CASSGRQGIDTEAFF

SEQ ID NO: 3566 - protein, 16 aa, synthetic construct
  REGION 1..16: note = Description of sequence: CDR3 from Table 9
CAWIDFLGQMNTEAFF

SEQ ID NO: 3567 - protein, 14 aa, synthetic construct
  REGION 1..14: note = Description of sequence: CDR3 from Table 9
CATSGTGGTGELFF

SEQ ID NO: 3568 - protein, 11 aa, synthetic construct
  REGION 1..11: note = Description of sequence: CDR3 from Table 9
CASSLSYEQYF

SEQ ID NO: 3569 - protein, 13 aa, synthetic construct
  REGION 1..13: note = Description of sequence: CDR3 from Table 9
CASSFGPGYEQYF

SEQ ID NO: 3570 - protein, 15 aa, synthetic construct
  REGION 1..15: note = Description of sequence: CDR3 from Table 9
CASSYARDRNTEAFF

SEQ ID NO: 3571 - protein, 13 aa, synthetic construct
  REGION 1..13: note = Description of sequence: CDR3 from Table 9
CAGWDRTPYEQYF

SEQ ID NO: 3572 - protein, 14 aa, synthetic construct
  REGION 1..14: note = Description of sequence: CDR3 from Table 9
CASSEDAGNYGYTF

SEQ ID NO: 3573 - protein, 15 aa, synthetic construct
  REGION 1..15: note = Description of sequence: CDR3 from Table 9
CASSEIQAFEETQYF

SEQ ID NO: 3574 - protein, 17 aa, synthetic construct
  REGION 1..17: note = Description of sequence: CDR3 from Table 9
CASSLFARGGPTDTQYF

SEQ ID NO: 3575 - protein, 13 aa, synthetic construct
  REGION 1..13: note = Description of sequence: CDR3 from Table 9
CASSFGSGNTIYF

SEQ ID NO: 3576 - protein, 17 aa, synthetic construct
  REGION 1..17: note = Description of sequence: CDR3 from Table 9
CASSPHSGGDPRNEQFF

SEQ ID NO: 3577 - protein, 14 aa, synthetic construct
  REGION 1..14: note = Description of sequence: CDR3 from Table 9
CASSVGGGHQPQHF

SEQ ID NO: 3578 - protein, 12 aa, synthetic construct
  REGION 1..12: note = Description of sequence: CDR3 from Table 9
CANGQGDYEQYF

SEQ ID NO: 3579 - protein, 16 aa, synthetic construct
  REGION 1..16: note = Description of sequence: CDR3 from Table 9
CASSETSGLIDEKLFF

SEQ ID NO: 3580 - protein, 14 aa, synthetic construct
  REGION 1..14: note = Description of sequence: CDR3 from Table 9
CASSLAYRPYEQYF

SEQ ID NO: 3581 - protein, 15 aa, synthetic construct
  REGION 1..15: note = Description of sequence: CDR3 from Table 9
CASSWTGDSNQPQHF

SEQ ID NO: 3582 - protein, 15 aa, synthetic construct
  REGION 1..15: note = Description of sequence: CDR3 from Table 9
CASSPPDQVYNEQFF

SEQ ID NO: 3583 - protein, 15 aa, synthetic construct
  REGION 1..15: note = Description of sequence: CDR3 from Table 9
CASSSNIWSPDTQYF

SEQ ID NO: 3584 - protein, 14 aa, synthetic construct
  REGION 1..14: note = Description of sequence: CDR3 from Table 9
CASSPWDSSGELFF

SEQ ID NO: 3585 - protein, 16 aa, synthetic construct
  REGION 1..16: note = Description of sequence: CDR3 from Table 9
CASSYYSGQGNEKLFF

SEQ ID NO: 3586 - protein, 13 aa, synthetic construct
  REGION 1..13: note = Description of sequence: CDR3 from Table 9
CASSLGGHQPQHF

SEQ ID NO: 3587 - protein, 13 aa, synthetic construct
  REGION 1..13: note = Description of sequence: CDR3 from Table 9
CASTESSYNEQFF

SEQ ID NO: 3588 - protein, 13 aa, synthetic construct
  REGION 1..13: note = Description of sequence: CDR3 from Table 9
CASSVQSTDTQYF

SEQ ID NO: 3589 - protein, 20 aa, synthetic construct
  REGION 1..20: note = Description of sequence: CDR3 from Table 9
CASSSTVGVRDYHSGNTIYF

SEQ ID NO: 3590 - protein, 12 aa, synthetic construct
  REGION 1..12: note = Description of sequence: CDR3 from Table 9
CASTDLSDTQYF

SEQ ID NO: 3591 - protein, 16 aa, synthetic construct
  REGION 1..16: note = Description of sequence: CDR3 from Table 9
CASSESGAAYTGELFF

SEQ ID NO: 3592 - protein, 14 aa, synthetic construct
  REGION 1..14: note = Description of sequence: CDR3 from Table 9
CATERGFRTDTQYF

SEQ ID NO: 3593 - protein, 14 aa, synthetic construct
  REGION 1..14: note = Description of sequence: CDR3 from Table 9
CASSYEQGPYEQYF

SEQ ID NO: 3594 - protein, 17 aa, synthetic construct
  REGION 1..17: note = Description of sequence: CDR3 from Table 9
CASSQAYGGDSSYEQYF

SEQ ID NO: 3595 - protein, 16 aa, synthetic construct
  REGION 1..16: note = Description of sequence: CDR3 from Table 9
CASGRSGGVGRNGYTF

SEQ ID NO: 3596 - protein, 15 aa, synthetic construct
  REGION 1..15: note = Description of sequence: CDR3 from Table 9
CASALGSGGAYEQFF

SEQ ID NO: 3597 - protein, 14 aa, synthetic construct
  REGION 1..14: note = Description of sequence: CDR3 from Table 9
CASTLGQGNTEAFF

SEQ ID NO: 3598 - protein, 15 aa, synthetic construct
  REGION 1..15: note = Description of sequence: CDR3 from Table 9
CASSQDTGSGNTIYF

SEQ ID NO: 3599 - protein, 16 aa, synthetic construct
  REGION 1..16: note = Description of sequence: CDR3 from Table 9
CASSQGPGTGFEGYTF

SEQ ID NO: 3600 - protein, 13 aa, synthetic construct
  REGION 1..13: note = Description of sequence: CDR3 from Table 9
CASRRGPTDTQYF

SEQ ID NO: 3601 - protein, 15 aa, synthetic construct
  REGION 1..15: note = Description of sequence: CDR3 from Table 9
CASSALAGGYNEQFF

SEQ ID NO: 3602 - protein, 13 aa, synthetic construct
  REGION 1..13: note = Description of sequence: CDR3 from Table 9
CSAPKEEPYGYTF

SEQ ID NO: 3603 - protein, 13 aa, synthetic construct
  REGION 1..13: note = Description of sequence: CDR3 from Table 9
CASSLTGSAEAFF

SEQ ID NO: 3604 - protein, 12 aa, synthetic construct
  REGION 1..12: note = Description of sequence: CDR3 from Table 9
CSVERGGDEQFF

SEQ ID NO: 3605 - protein, 17 aa, synthetic construct
  REGION 1..17: note = Description of sequence: CDR3 from Table 9
CASSYSISGQGGETQYF

SEQ ID NO: 3606 - protein, 14 aa, synthetic construct
  REGION 1..14: note = Description of sequence: CDR3 from Table 9
CASSGRQGSYEQYF

SEQ ID NO: 3607 - protein, 20 aa, synthetic construct
  REGION 1..20: note = Description of sequence: CDR3 from Table 9
CSAPSYRELAGAYLQETQYF

SEQ ID NO: 3608 - protein, 13 aa, synthetic construct
  REGION 1..13: note = Description of sequence: CDR3 from Table 9
CSARTWTGNTIYF

SEQ ID NO: 3609 - protein, 17 aa, synthetic construct
  REGION 1..17: note = Description of sequence: CDR3 from Table 9
CASSLVAGPYSQETQYF

SEQ ID NO: 3610 - protein, 14 aa, synthetic construct
  REGION 1..14: note = Description of sequence: CDR3 from Table 9
CASSPRTGVGEQYF

SEQ ID NO: 3611 - protein, 16 aa, synthetic construct
  REGION 1..16: note = Description of sequence: CDR3 from Table 9
CASSFRQTLAVYEQYF

SEQ ID NO: 3612 - protein, 16 aa, synthetic construct
  REGION 1..16: note = Description of sequence: CDR3 from Table 9
CASSLGQEIPYYGYTF

SEQ ID NO: 3613 - protein, 15 aa, synthetic construct
  REGION 1..15: note = Description of sequence: CDR3 from Table 9
CASSSQGGAKNEQYF

SEQ ID NO: 3614 - protein, 16 aa, synthetic construct
  REGION 1..16: note = Description of sequence: CDR3 from Table 9
CASSLVGADRSGELFF

SEQ ID NO: 3615 - protein, 14 aa, synthetic construct
  REGION 1..14: note = Description of sequence: CDR3 from Table 9
CASSYGQPNTEAFF

SEQ ID NO: 3616 - protein, 13 aa, synthetic construct
  REGION 1..13: note = Description of sequence: CDR3 from Table 9
CSARTGNTNEQFF

SEQ ID NO: 3617 - protein, 16 aa, synthetic construct
  REGION 1..16: note = Description of sequence: CDR3 from Table 9
CASSQGTGGIVDIQYF

SEQ ID NO: 3618 - protein, 13 aa, synthetic construct
  REGION 1..13: note = Description of sequence: CDR3 from Table 9
CASRDILYNEQFF

SEQ ID NO: 3619 - protein, 15 aa, synthetic construct
  REGION 1..15: note = Description of sequence: CDR3 from Table 9
CASSSQSSGANVLTF

SEQ ID NO: 3620 - protein, 14 aa, synthetic construct
  REGION 1..14: note = Description of sequence: CDR3 from Table 9
CASSQMTGGGEQFF

SEQ ID NO: 3621 - protein, 11 aa, synthetic construct
  REGION 1..11: note = Description of sequence: CDR3 from Table 9
CASSPGGEAFF

SEQ ID NO: 3622 - protein, 16 aa, synthetic construct
  REGION 1..16: note = Description of sequence: CDR3 from Table 9
CASSLVRQEAAGELFF

SEQ ID NO: 3623 - protein, 15 aa, synthetic construct
  REGION 1..15: note = Description of sequence: CDR3 from Table 9
CASSGGQGWTDTQYF

SEQ ID NO: 3624 - protein, 13 aa, synthetic construct
  REGION 1..13: note = Description of sequence: CDR3 from Table 9
CASRPRQVETQYF

SEQ ID NO: 3625 - protein, 14 aa, synthetic construct
  REGION 1..14: note = Description of sequence: CDR3 from Table 9
CASGTLNSNQPQHF

SEQ ID NO: 3626 - protein, 12 aa, synthetic construct
  REGION 1..12: note = Description of sequence: CDR3 from Table 9
CASRRDSSGYTF

SEQ ID NO: 3627 - protein, 12 aa, synthetic construct
  REGION 1..12: note = Description of sequence: CDR3 from Table 9
CSVEQGGDTQYF

SEQ ID NO: 3628 - protein, 13 aa, synthetic construct
  REGION 1..13: note = Description of sequence: CDR3 from Table 9
CASSGFSNQPQHF

SEQ ID NO: 3629 - protein, 12 aa, synthetic construct
  REGION 1..12: note = Description of sequence: CDR3 from Table 9
CATLWGTDTQYF

SEQ ID NO: 3630 - protein, 14 aa, synthetic construct
  REGION 1..14: note = Description of sequence: CDR3 from Table 9
CASSYIPGRYEQYF

SEQ ID NO: 3631 - protein, 12 aa, synthetic construct
  REGION 1..12: note = Description of sequence: CDR3 from Table 9
CASSLEGEKLFF

SEQ ID NO: 3632 - protein, 15 aa, synthetic construct
  REGION 1..15: note = Description of sequence: CDR3 from Table 9
CASSEFRDRNQPQHF

SEQ ID NO: 3633 - protein, 18 aa, synthetic construct
  REGION 1..18: note = Description of sequence: CDR3 from Table 9
CASSQGRRGGGDKNIQYF

SEQ ID NO: 3634 - protein, 15 aa, synthetic construct
  REGION 1..15: note = Description of sequence: CDR3 from Table 9
CSARSEKSGANVLTF

SEQ ID NO: 3635 - protein, 13 aa, synthetic construct
  REGION 1..13: note = Description of sequence: CDR3 from Table 9
CASSSGGGQPQHF

SEQ ID NO: 3636 - protein, 13 aa, synthetic construct
  REGION 1..13: note = Description of sequence: CDR3 from Table 9
CASSSSSGDEQYF

SEQ ID NO: 3637 - protein, 16 aa, synthetic construct
  REGION 1..16: note = Description of sequence: CDR3 from Table 9
CAISELDWGVSSPLHF

SEQ ID NO: 3638 - protein, 12 aa, synthetic construct
  REGION 1..12: note = Description of sequence: CDR3 from Table 9
CATSPSLGTQYF

SEQ ID NO: 3639 - protein, 16 aa, synthetic construct
  REGION 1..16: note = Description of sequence: CDR3 from Table 9
CATSKTADRSPYEQYF

SEQ ID NO: 3640 - protein, 17 aa, synthetic construct
  REGION 1..17: note = Description of sequence: CDR3 from Table 9
CASSQEGRQGSYNEQFF

SEQ ID NO: 3641 - protein, 14 aa, synthetic construct
  REGION 1..14: note = Description of sequence: CDR3 from Table 9
CASRPGQVVYGYTF

SEQ ID NO: 3642 - protein, 18 aa, synthetic construct
  REGION 1..18: note = Description of sequence: CDR3 from Table 9
CASSLKTDSTPLQETQYF

SEQ ID NO: 3643 - protein, 15 aa, synthetic construct
  REGION 1..15: note = Description of sequence: CDR3 from Table 9
CASSQGTSGTDTQYF

SEQ ID NO: 3644 - protein, 13 aa, synthetic construct
  REGION 1..13: note = Description of sequence: CDR3 from Table 9
CAWSWTVNTEAFF

SEQ ID NO: 3645 - protein, 17 aa, synthetic construct
  REGION 1..17: note = Description of sequence: CDR3 from Table 9
CSVVGTGSVITNEKLFF

SEQ ID NO: 3646 - protein, 16 aa, synthetic construct
  REGION 1..16: note = Description of sequence: CDR3 from Table 9
CASSSDLRTNYNEQFF

SEQ ID NO: 3647 - protein, 13 aa, synthetic construct
  REGION 1..13: note = Description of sequence: CDR3 from Table 9
CASSQDEGYEQYF

SEQ ID NO: 3648 - protein, 12 aa, synthetic construct
  REGION 1..12: note = Description of sequence: CDR3 from Table 9
CASSQDLNEQYF

SEQ ID NO: 3649 - protein, 12 aa, synthetic construct
  REGION 1..12: note = Description of sequence: CDR3 from Table 9
CASSPVGDTQYF

SEQ ID NO: 3650 - protein, 16 aa, synthetic construct
  REGION 1..16: note = Description of sequence: CDR3 from Table 9
CASSLDLAGGFYEQYF

SEQ ID NO: 3651 - protein, 14 aa, synthetic construct
  REGION 1..14: note = Description of sequence: CDR3 from Table 9
CSARDPQGFDGYTF

SEQ ID NO: 3652 - protein, 11 aa, synthetic construct
  REGION 1..11: note = Description of sequence: CDR3 from Table 9
CASSQAGEQYF

SEQ ID NO: 3653 - protein, 12 aa, synthetic construct
  REGION 1..12: note = Description of sequence: CDR3 from Table 9
CASSPYGNTIYF

SEQ ID NO: 3654 - protein, 14 aa, synthetic construct
  REGION 1..14: note = Description of sequence: CDR3 from Table 9
CASSPPGTYNEQFF

SEQ ID NO: 3655 - protein, 11 aa, synthetic construct
  REGION 1..11: note = Description of sequence: CDR3 from Table 9
CSVPSYNEQFF

SEQ ID NO: 3656 - protein, 16 aa, synthetic construct
  REGION 1..16: note = Description of sequence: CDR3 from Table 9
CASSTQGTGVYNEQFF

SEQ ID NO: 3657 - protein, 15 aa, synthetic construct
  REGION 1..15: note = Description of sequence: CDR3 from Table 9
CATSRPTDWVETQYF

SEQ ID NO: 3658 - protein, 12 aa, synthetic construct
  REGION 1..12: note = Description of sequence: CDR3 from Table 9
CASSPTGNEQFF

SEQ ID NO: 3659 - protein, 16 aa, synthetic construct
  REGION 1..16: note = Description of sequence: CDR3 from Table 9
CASSYPSTGSSYEQYF

SEQ ID NO: 3660 - protein, 11 aa, synthetic construct
  REGION 1..11: note = Description of sequence: CDR3 from Table 9
CSVAGGTEAFF

SEQ ID NO: 3661 - protein, 12 aa, synthetic construct
  REGION 1..12: note = Description of sequence: CDR3 from Table 9
CSARGAFHEQYF

SEQ ID NO: 3662 - protein, 15 aa, synthetic construct
  REGION 1..15: note = Description of sequence: CDR3 from Table 9
CASSIQGALTDTQYF

SEQ ID NO: 3663 - protein, 13 aa, synthetic construct
  REGION 1..13: note = Description of sequence: CDR3 from Table 9
CASSPSQGYGYTF

SEQ ID NO: 3664 - protein, 11 aa, synthetic construct
  REGION 1..11: note = Description of sequence: CDR3 from Table 9
CASSYFLEQYF

SEQ ID NO: 3665 - protein, 15 aa, synthetic construct
  REGION 1..15: note = Description of sequence: CDR3 from Table 9
CASSIGGQRYNEQFF

SEQ ID NO: 3666 - protein, 14 aa, synthetic construct
  REGION 1..14: note = Description of sequence: CDR3 from Table 9
CASSGGGAGNEQFF

SEQ ID NO: 3667 - protein, 13 aa, synthetic construct
  REGION 1..13: note = Description of sequence: CDR3 from Table 9
CASSEGQGYEQYF

SEQ ID NO: 3668 - protein, 17 aa, synthetic construct
  REGION 1..17: note = Description of sequence: CDR3 from Table 9
CASSPYGQGGRDTEAFF

SEQ ID NO: 3669 - protein, 11 aa, synthetic construct
  REGION 1..11: note = Description of sequence: CDR3 from Table 9
CASKSNTEAFF

SEQ ID NO: 3670 - protein, 13 aa, synthetic construct
  REGION 1..13: note = Description of sequence: CDR3 from Table 9
CASSPTGSYGYTF

SEQ ID NO: 3671 - protein, 14 aa, synthetic construct
  REGION 1..14: note = Description of sequence: CDR3 from Table 9
CASGTELMNTEAFF

SEQ ID NO: 3672 - protein, 14 aa, synthetic construct
  REGION 1..14: note = Description of sequence: CDR3 from Table 9
CASSETGYAYEQYF

SEQ ID NO: 3673 - protein, 14 aa, synthetic construct
  REGION 1..14: note = Description of sequence: CDR3 from Table 9
CATRDSQSSYEQYF

SEQ ID NO: 3674 - protein, 13 aa, synthetic construct
  REGION 1..13: note = Description of sequence: CDR3 from Table 9
CASSAGQGYEQYF

SEQ ID NO: 3675 - protein, 14 aa, synthetic construct
  REGION 1..14: note = Description of sequence: CDR3 from Table 9
CASSLASQVETQYF

SEQ ID NO: 3676 - protein, 13 aa, synthetic construct
  REGION 1..13: note = Description of sequence: CDR3 from Table 9
CAWSHSGGYEQYF

SEQ ID NO: 3677 - protein, 7 aa, synthetic construct
  REGION 1..7: note = Description of sequence: CDR3 from Table 9
CSGDAFF

SEQ ID NO: 3678 - protein, 11 aa, synthetic construct
  REGION 1..11: note = Description of sequence: CDR3 from Table 9
CASTPGTEAFF

SEQ ID NO: 3679 - protein, 13 aa, synthetic construct
  REGION 1..13: note = Description of sequence: CDR3 from Table 9
CASSDGRADTQYF

SEQ ID NO: 3680 - protein, 12 aa, synthetic construct
  REGION 1..12: note = Description of sequence: CDR3 from Table 9
CASSWLNTEAFF

SEQ ID NO: 3681 - protein, 15 aa, synthetic construct
  REGION 1..15: note = Description of sequence: CDR3 from Table 9
CASSVGGGSNQPQHF

SEQ ID NO: 3682 - protein, 16 aa, synthetic construct
  REGION 1..16: note = Description of sequence: CDR3 from Table 9
CASSGVAEWALETQYF

SEQ ID NO: 3683 - protein, 15 aa, synthetic construct
  REGION 1..15: note = Description of sequence: CDR3 from Table 9
CASRNTGTTNEKLFF

SEQ ID NO: 3684 - protein, 13 aa, synthetic construct
  REGION 1..13: note = Description of sequence: CDR3 from Table 9
CASSPTLADEQYF

SEQ ID NO: 3685 - protein, 17 aa, synthetic construct
  REGION 1..17: note = Description of sequence: CDR3 from Table 9
CASSLPDRGGTKNIQYF

SEQ ID NO: 3686 - protein, 16 aa, synthetic construct
  REGION 1..16: note = Description of sequence: CDR3 from Table 9
CASSLLGQSTNEKLFF

SEQ ID NO: 3687 - protein, 13 aa, synthetic construct
  REGION 1..13: note = Description of sequence: CDR3 from Table 9
CSVDLGTEETQYF

SEQ ID NO: 3688 - protein, 16 aa, synthetic construct
  REGION 1..16: note = Description of sequence: CDR3 from Table 9
CASSPAVGTGDEKLFF

SEQ ID NO: 3689 - protein, 12 aa, synthetic construct
  REGION 1..12: note = Description of sequence: CDR3 from Table 9
CASSEPGPWAFF

SEQ ID NO: 3690 - protein, 13 aa, synthetic construct
  REGION 1..13: note = Description of sequence: CDR3 from Table 9
CASSVTSDQTQYF

SEQ ID NO: 3691 - protein, 14 aa, synthetic construct
  REGION 1..14: note = Description of sequence: CDR3 from Table 9
CASSFRGNTGELFF

SEQ ID NO: 3692 - protein, 16 aa, synthetic construct
  REGION 1..16: note = Description of sequence: CDR3 from Table 9
CASSPTGTGGSDTQYF

SEQ ID NO: 3693 - protein, 14 aa, synthetic construct
  REGION 1..14: note = Description of sequence: CDR3 from Table 9
CASSFMTEAGELFF

SEQ ID NO: 3694 - protein, 13 aa, synthetic construct
  REGION 1..13: note = Description of sequence: CDR3 from Table 9
CASDSGSGQPQHF

SEQ ID NO: 3695 - protein, 11 aa, synthetic construct
  REGION 1..11: note = Description of sequence: CDR3 from Table 9
CASFNTGELFF

SEQ ID NO: 3696 - protein, 17 aa, synthetic construct
  REGION 1..17: note = Description of sequence: CDR3 from Table 9
CSARDPVGGSNTGELFF

SEQ ID NO: 3697 - protein, 11 aa, synthetic construct
  REGION 1..11: note = Description of sequence: CDR3 from Table 9
CASSPTAEAFF

SEQ ID NO: 3698 - protein, 16 aa, synthetic construct
  REGION 1..16: note = Description of sequence: CDR3 from Table 9
CASSQDRGRDQETQYF

SEQ ID NO: 3699 - protein, 16 aa, synthetic construct
  REGION 1..16: note = Description of sequence: CDR3 from Table 9
CASSPLGLAEQETQYF

SEQ ID NO: 3700 - protein, 15 aa, synthetic construct
  REGION 1..15: note = Description of sequence: CDR3 from Table 9
CASSLVRDRHTEAFF

SEQ ID NO: 3701 - protein, 12 aa, synthetic construct
  REGION 1..12: note = Description of sequence: CDR3 from Table 9
CASGGDAYEQYF

SEQ ID NO: 3702 - protein, 16 aa, synthetic construct
  REGION 1..16: note = Description of sequence: CDR3 from Table 9
CASTPGTSASRDTQYF

SEQ ID NO: 3703 - protein, 13 aa, synthetic construct
  REGION 1..13: note = Description of sequence: CDR3 from Table 9
CASSPGTAYEQYF

SEQ ID NO: 3704 - protein, 12 aa, synthetic construct
  REGION 1..12: note = Description of sequence: CDR3 from Table 9
CASSLSADTQYF

SEQ ID NO: 3705 - protein, 11 aa, synthetic construct
  REGION 1..11: note = Description of sequence: CDR3 from Table 9
CASSDGNEQFF

SEQ ID NO: 3706 - protein, 11 aa, synthetic construct
  REGION 1..11: note = Description of sequence: CDR3 from Table 9
CASDSNYGYTF

SEQ ID NO: 3707 - protein, 13 aa, synthetic construct
  REGION 1..13: note = Description of sequence: CDR3 from Table 9
CASSPGTGYEQYF

SEQ ID NO: 3708 - protein, 13 aa, synthetic construct
  REGION 1..13: note = Description of sequence: CDR3 from Table 9
CASSVAGGYEQYF

SEQ ID NO: 3709 - protein, 14 aa, synthetic construct
  REGION 1..14: note = Description of sequence: CDR3 from Table 9
CASSWDRGTYEQYF

SEQ ID NO: 3710 - protein, 14 aa, synthetic construct
  REGION 1..14: note = Description of sequence: CDR3 from Table 9
CASSWRRGTDTQYF

SEQ ID NO: 3711 - protein, 14 aa, synthetic construct
  REGION 1..14: note = Description of sequence: CDR3 from Table 9
CASSLEFGADTQYF

SEQ ID NO: 3712 - protein, 15 aa, synthetic construct
  REGION 1..15: note = Description of sequence: CDR3 from Table 9
CASSRTGSLNYGYTF

SEQ ID NO: 3713 - protein, 13 aa, synthetic construct
  REGION 1..13: note = Description of sequence: CDR3 from Table 9
CASSSQELTEAFF

SEQ ID NO: 3714 - protein, 12 aa, synthetic construct
  REGION 1..12: note = Description of sequence: CDR3 from Table 9
CASSEKPDTQYF

SEQ ID NO: 3715 - protein, 13 aa, synthetic construct
  REGION 1..13: note = Description of sequence: CDR3 from Table 9
CASSPGQGYEQYF

SEQ ID NO: 3716 - protein, 15 aa, synthetic construct
  REGION 1..15: note = Description of sequence: CDR3 from Table 9
CASSTLIGSGNTIYF

SEQ ID NO: 3717 - protein, 14 aa, synthetic construct
  REGION 1..14: note = Description of sequence: CDR3 from Table 9
CASSQVVVGYGYTF

SEQ ID NO: 3718 - protein, 14 aa, synthetic construct
  REGION 1..14: note = Description of sequence: CDR3 from Table 9
CSARTGIGPYEQYF

SEQ ID NO: 3719 - protein, 13 aa, synthetic construct
  REGION 1..13: note = Description of sequence: CDR3 from Table 9
CASSPAPAYEQYF

SEQ ID NO: 3720 - protein, 13 aa, synthetic construct
  REGION 1..13: note = Description of sequence: CDR3 from Table 9
CSARGGGFETQYF

SEQ ID NO: 3721 - protein, 14 aa, synthetic construct
  REGION 1..14: note = Description of sequence: CDR3 from Table 9
CASSMSGWGDTQYF

SEQ ID NO: 3722 - protein, 13 aa, synthetic construct
  REGION 1..13: note = Description of sequence: CDR3 from Table 9
CASSSPSGYEQYF

SEQ ID NO: 3723 - protein, 17 aa, synthetic construct
  REGION 1..17: note = Description of sequence: CDR3 from Table 9
CSARWDRVSSSTDTQYF

SEQ ID NO: 3724 - protein, 15 aa, synthetic construct
  REGION 1..15: note = Description of sequence: CDR3 from Table 9
CASSPTPGTGETQYF

SEQ ID NO: 3725 - protein, 15 aa, synthetic construct
  REGION 1..15: note = Description of sequence: CDR3 from Table 9
CASSRDGPSSYEQYF

SEQ ID NO: 3726 - protein, 13 aa, synthetic construct
  REGION 1..13: note = Description of sequence: CDR3 from Table 9
CASSEGWVDTQYF

SEQ ID NO: 3727 - protein, 13 aa, synthetic construct
  REGION 1..13: note = Description of sequence: CDR3 from Table 9
CASSQATGYEQYF

SEQ ID NO: 3728 - protein, 14 aa, synthetic construct
  REGION 1..14: note = Description of sequence: CDR3 from Table 9
CASSPSGGVYGYTF

SEQ ID NO: 3729 - protein, 16 aa, synthetic construct
  REGION 1..16: note = Description of sequence: CDR3 from Table 9
CASSPPDGQGDYGYTF

SEQ ID NO: 3730 - protein, 13 aa, synthetic construct
  REGION 1..13: note = Description of sequence: CDR3 from Table 9
CASSSLGGYEQYF

SEQ ID NO: 3731 - protein, 13 aa, synthetic construct
  REGION 1..13: note = Description of sequence: CDR3 from Table 9
CASSVSTNYEQYF

SEQ ID NO: 3732 - protein, 14 aa, synthetic construct
  REGION 1..14: note = Description of sequence: CDR3 from Table 9
CSARDVGISYEQYF

SEQ ID NO: 3733 - protein, 15 aa, synthetic construct
  REGION 1..15: note = Description of sequence: CDR3 from Table 9
CASTVRQGSNQPQHF

SEQ ID NO: 3734 - protein, 13 aa, synthetic construct
  REGION 1..13: note = Description of sequence: CDR3 from Table 9
CASSPDRFYEQYF

SEQ ID NO: 3735 - protein, 15 aa, synthetic construct
  REGION 1..15: note = Description of sequence: CDR3 from Table 9
CASSSPGQGYYEQYF

SEQ ID NO: 3736 - protein, 17 aa, synthetic construct
  REGION 1..17: note = Description of sequence: CDR3 from Table 9
CASSYVNGGAIGGELFF

SEQ ID NO: 3737 - protein, 14 aa, synthetic construct
  REGION 1..14: note = Description of sequence: CDR3 from Table 9
CASSLGAGSYEQYF

SEQ ID NO: 3738 - protein, 15 aa, synthetic construct
  REGION 1..15: note = Description of sequence: CDR3 from Table 9
CSVEEWDTSGNTIYF

SEQ ID NO: 3739 - protein, 13 aa, synthetic construct
  REGION 1..13: note = Description of sequence: CDR3 from Table 9
CASSQGEGYEQYF

SEQ ID NO: 3740 - protein, 13 aa, synthetic construct
  REGION 1..13: note = Description of sequence: CDR3 from Table 9
CASNLGGDNEQFF

SEQ ID NO: 3741 - protein, 13 aa, synthetic construct
  REGION 1..13: note = Description of sequence: CDR3 from Table 9
CASSFSGTFEAFF

SEQ ID NO: 3742 - protein, 14 aa, synthetic construct
  REGION 1..14: note = Description of sequence: CDR3 from Table 9
CASSISPSSYEQYF

SEQ ID NO: 3743 - protein, 17 aa, synthetic construct
  REGION 1..17: note = Description of sequence: CDR3 from Table 9
CASSPRTGFSSGNTIYF

SEQ ID NO: 3744 - protein, 12 aa, synthetic construct
  REGION 1..12: note = Description of sequence: CDR3 from Table 9
CASSYSGAEQYF

SEQ ID NO: 3745 - protein, 14 aa, synthetic construct
  REGION 1..14: note = Description of sequence: CDR3 from Table 9
CASSEFTRSYEQYF

SEQ ID NO: 3746 - protein, 13 aa, synthetic construct
  REGION 1..13: note = Description of sequence: CDR3 from Table 9
CASSIAPGNEQYF

SEQ ID NO: 3747 - protein, 15 aa, synthetic construct
  REGION 1..15: note = Description of sequence: CDR3 from Table 9
CASSQYSLSTDTQYF

SEQ ID NO: 3748 - protein, 15 aa, synthetic construct
  REGION 1..15: note = Description of sequence: CDR3 from Table 9
CASSVVGARTDTQYF

SEQ ID NO: 3749 - protein, 16 aa, synthetic construct
  REGION 1..16: note = Description of sequence: CDR3 from Table 9
CASSDPRGQPNQPQHF

SEQ ID NO: 3750 - protein, 13 aa, synthetic construct
  REGION 1..13: note = Description of sequence: CDR3 from Table 9
CASSPGGYYGYTF

SEQ ID NO: 3751 - protein, 13 aa, synthetic construct
  REGION 1..13: note = Description of sequence: CDR3 from Table 9
CASNTGYQETQYF

SEQ ID NO: 3752 - protein, 13 aa, synthetic construct
  REGION 1..13: note = Description of sequence: CDR3 from Table 9
CASSYNQGYEQYF

SEQ ID NO: 3753 - protein, 13 aa, synthetic construct
  REGION 1..13: note = Description of sequence: CDR3 from Table 9
CASSVTPADTQYF

SEQ ID NO: 3754 - protein, 15 aa, synthetic construct
  REGION 1..15: note = Description of sequence: CDR3 from Table 9
CASSLEDSANYGYTF

SEQ ID NO: 3755 - protein, 12 aa, synthetic construct
  REGION 1..12: note = Description of sequence: CDR3 from Table 9
CASSYSGQGYTF

SEQ ID NO: 3756 - protein, 12 aa, synthetic construct
  REGION 1..12: note = Description of sequence: CDR3 from Table 9
CASSSGYNEQFF

SEQ ID NO: 3757 - protein, 11 aa, synthetic construct
  REGION 1..11: note = Description of sequence: CDR3 from Table 9
CASSISTEAFF

SEQ ID NO: 3758 - protein, 15 aa, synthetic construct
  REGION 1..15: note = Description of sequence: CDR3 from Table 9
CASTKTGLGDQPQHF

SEQ ID NO: 3759 - protein, 14 aa, synthetic construct
  REGION 1..14: note = Description of sequence: CDR3 from Table 9
CASSVGGGEVEAFF

SEQ ID NO: 3760 - protein, 18 aa, synthetic construct
  REGION 1..18: note = Description of sequence: CDR3 from Table 9
CSAGIPGQVFSSNEKLFF

SEQ ID NO: 3761 - protein, 14 aa, synthetic construct
  REGION 1..14: note = Description of sequence: CDR3 from Table 9
CASSPYSGANVLTF

SEQ ID NO: 3762 - protein, 14 aa, synthetic construct
  REGION 1..14: note = Description of sequence: CDR3 from Table 9
CASSLAGADNEQFF

SEQ ID NO: 3763 - protein, 14 aa, synthetic construct
  REGION 1..14: note = Description of sequence: CDR3 from Table 9
CASIPVGSRNTIYF

SEQ ID NO: 3764 - protein, 14 aa, synthetic construct
  REGION 1..14: note = Description of sequence: CDR3 from Table 9
CASSLGQGYNEQFF

SEQ ID NO: 3765 - protein, 13 aa, synthetic construct
  REGION 1..13: note = Description of sequence: CDR3 from Table 9
CASSQWGGNEQFF

SEQ ID NO: 3766 - protein, 13 aa, synthetic construct
  REGION 1..13: note = Description of sequence: CDR3 from Table 9
CASAPGLNYEQYF

SEQ ID NO: 3767 - protein, 12 aa, synthetic construct
  REGION 1..12: note = Description of sequence: CDR3 from Table 9
CASSSESGELFF

SEQ ID NO: 3768 - protein, 13 aa, synthetic construct
  REGION 1..13: note = Description of sequence: CDR3 from Table 9
CASSEHRDHEQFF

SEQ ID NO: 3769 - protein, 15 aa, synthetic construct
  REGION 1..15: note = Description of sequence: CDR3 from Table 9
CASSVPGQGVLEQYF

SEQ ID NO: 3770 - protein, 15 aa, synthetic construct
  REGION 1..15: note = Description of sequence: CDR3 from Table 9
CSARDRGSSNEKLFF

SEQ ID NO: 3771 - protein, 14 aa, synthetic construct
  REGION 1..14: note = Description of sequence: CDR3 from Table 9
CASSPDPSGNEQFF

SEQ ID NO: 3772 - protein, 11 aa, synthetic construct
  REGION 1..11: note = Description of sequence: CDR3 from Table 9
CASSYGLEQYF

SEQ ID NO: 3773 - protein, 14 aa, synthetic construct
  REGION 1..14: note = Description of sequence: CDR3 from Table 9
CASSLGQGTYEQYF

SEQ ID NO: 3774 - protein, 13 aa, synthetic construct
  REGION 1..13: note = Description of sequence: CDR3 from Table 9
CASSSAGLPEQYF

SEQ ID NO: 3775 - protein, 13 aa, synthetic construct
  REGION 1..13: note = Description of sequence: CDR3 from Table 9
CASSLDFQGPRDF

SEQ ID NO: 3776 - protein, 14 aa, synthetic construct
  REGION 1..14: note = Description of sequence: CDR3 from Table 9
CASSTGQGGDTQYF

SEQ ID NO: 3777 - protein, 14 aa, synthetic construct
  REGION 1..14: note = Description of sequence: CDR3 from Table 9
CASRRQATNEKLFF

SEQ ID NO: 3778 - protein, 13 aa, synthetic construct
  REGION 1..13: note = Description of sequence: CDR3 from Table 9
CASSMDAYTEAFF

SEQ ID NO: 3779 - protein, 14 aa, synthetic construct
  REGION 1..14: note = Description of sequence: CDR3 from Table 9
CASSSSGGLDTQYF

SEQ ID NO: 3780 - protein, 17 aa, synthetic construct
  REGION 1..17: note = Description of sequence: CDR3 from Table 9
CASSPRLAGGKYNEQFF

SEQ ID NO: 3781 - protein, 14 aa, synthetic construct
  REGION 1..14: note = Description of sequence: CDR3 from Table 9
CASSEERPGEGYTF

SEQ ID NO: 3782 - protein, 16 aa, synthetic construct
  REGION 1..16: note = Description of sequence: CDR3 from Table 9
CASSIPSRTTNYGYTF

SEQ ID NO: 3783 - protein, 13 aa, synthetic construct
  REGION 1..13: note = Description of sequence: CDR3 from Table 9
CARTGAGGNTIYF

SEQ ID NO: 3784 - protein, 13 aa, synthetic construct
  REGION 1..13: note = Description of sequence: CDR3 from Table 9
CASSIAPAYGYTF

SEQ ID NO: 3785 - protein, 15 aa, synthetic construct
  REGION 1..15: note = Description of sequence: CDR3 from Table 9
CSARNRDTYYNEQFF

SEQ ID NO: 3786 - protein, 14 aa, synthetic construct
  REGION 1..14: note = Description of sequence: CDR3 from Table 9
CASSFRRDTDTQYF

SEQ ID NO: 3787 - protein, 14 aa, synthetic construct
  REGION 1..14: note = Description of sequence: CDR3 from Table 9
CASSSWTGGNEQYF

SEQ ID NO: 3788 - protein, 15 aa, synthetic construct
  REGION 1..15: note = Description of sequence: CDR3 from Table 9
CASSVPGTPNTEAFF

SEQ ID NO: 3789 - protein, 16 aa, synthetic construct
  REGION 1..16: note = Description of sequence: CDR3 from Table 9
CASSLSWLDSQETQYF

SEQ ID NO: 3790 - protein, 14 aa, synthetic construct
  REGION 1..14: note = Description of sequence: CDR3 from Table 9
CASSVDGTEETQYF

SEQ ID NO: 3791 - protein, 13 aa, synthetic construct
  REGION 1..13: note = Description of sequence: CDR3 from Table 9
CASSLGGGIEAFF

SEQ ID NO: 3792 - protein, 12 aa, synthetic construct
  REGION 1..12: note = Description of sequence: CDR3 from Table 9
CASSEWDTEAFF

SEQ ID NO: 3793 - protein, 14 aa, synthetic construct
  REGION 1..14: note = Description of sequence: CDR3 from Table 9
CASSAGTIYNEQFF

SEQ ID NO: 3794 - protein, 17 aa, synthetic construct
  REGION 1..17: note = Description of sequence: CDR3 from Table 9
CASSQVRDRDINYGYTF

SEQ ID NO: 3795 - protein, 11 aa, synthetic construct
  REGION 1..11: note = Description of sequence: CDR3 from Table 9
CASSGPRGYTF

SEQ ID NO: 3796 - protein, 13 aa, synthetic construct
  REGION 1..13: note = Description of sequence: CDR3 from Table 9
CASSQDWGAEAFF

SEQ ID NO: 3797 - protein, 18 aa, synthetic construct
  REGION 1..18: note = Description of sequence: CDR3 from Table 9
CASSLVLYDGGLQETQYF

SEQ ID NO: 3798 - protein, 15 aa, synthetic construct
  REGION 1..15: note = Description of sequence: CDR3 from Table 9
CASSAFGIVADTQYF

SEQ ID NO: 3799 - protein, 14 aa, synthetic construct
  REGION 1..14: note = Description of sequence: CDR3 from Table 9
CATSGGQSNEKLFF

SEQ ID NO: 3800 - protein, 15 aa, synthetic construct
  REGION 1..15: note = Description of sequence: CDR3 from Table 9
CASSLSYTPHQPQHF

SEQ ID NO: 3801 - protein, 14 aa, synthetic construct
  REGION 1..14: note = Description of sequence: CDR3 from Table 9
CASSPGGTNEKLFF

SEQ ID NO: 3802 - protein, 16 aa, synthetic construct
  REGION 1..16: note = Description of sequence: CDR3 from Table 9
CASSYLMGQGKGQAFF

SEQ ID NO: 3803 - protein, 12 aa, synthetic construct
  REGION 1..12: note = Description of sequence: CDR3 from Table 9
CASSAGGTEAFF

SEQ ID NO: 3804 - protein, 17 aa, synthetic construct
  REGION 1..17: note = Description of sequence: CDR3 from Table 9
CASSPYGDQLNTGELFF

SEQ ID NO: 3805 - protein, 14 aa, synthetic construct
  REGION 1..14: note = Description of sequence: CDR3 from Table 9
CASNREVSTDTQYF

SEQ ID NO: 3806 - protein, 15 aa, synthetic construct
  REGION 1..15: note = Description of sequence: CDR3 from Table 9
CASRGTGTGSYEQYF

SEQ ID NO: 3807 - protein, 12 aa, synthetic construct
  REGION 1..12: note = Description of sequence: CDR3 from Table 9
CSVPGTAYEQYF

SEQ ID NO: 3808 - protein, 14 aa, synthetic construct
  REGION 1..14: note = Description of sequence: CDR3 from Table 9
CAISDLDSNQPQHF

SEQ ID NO: 3809 - protein, 14 aa, synthetic construct
  REGION 1..14: note = Description of sequence: CDR3 from Table 9
CASSISGGSYEQYF

SEQ ID NO: 3810 - protein, 17 aa, synthetic construct
  REGION 1..17: note = Description of sequence: CDR3 from Table 9
CASSLSWEDENTDTQYF

SEQ ID NO: 3811 - protein, 15 aa, synthetic construct
  REGION 1..15: note = Description of sequence: CDR3 from Table 9
CSARVPTSFTDTQYF

SEQ ID NO: 3812 - protein, 15 aa, synthetic construct
  REGION 1..15: note = Description of sequence: CDR3 from Table 9
CASSASEPSGETQYF

SEQ ID NO: 3813 - protein, 17 aa, synthetic construct
  REGION 1..17: note = Description of sequence: CDR3 from Table 9
CASSFPVSDPSTDTQYF

SEQ ID NO: 3814 - protein, 11 aa, synthetic construct
  REGION 1..11: note = Description of sequence: CDR3 from Table 9
CASSFGETQYF

SEQ ID NO: 3815 - protein, 14 aa, synthetic construct
  REGION 1..14: note = Description of sequence: CDR3 from Table 9
CASSPTSGGYEQYF

SEQ ID NO: 3816 - protein, 11 aa, synthetic construct
  REGION 1..11: note = Description of sequence: CDR3 from Table 9
CASGPNQPQHF

SEQ ID NO: 3817 - protein, 16 aa, synthetic construct
  REGION 1..16: note = Description of sequence: CDR3 from Table 9
CASSPWTGSYQETQYF

SEQ ID NO: 3818 - protein, 13 aa, synthetic construct
  REGION 1..13: note = Description of sequence: CDR3 from Table 9
CARTGEDNSPLHF

SEQ ID NO: 3819 - protein, 13 aa, synthetic construct
  REGION 1..13: note = Description of sequence: CDR3 from Table 9
CASSTGISYEQYF

SEQ ID NO: 3820 - protein, 15 aa, synthetic construct
  REGION 1..15: note = Description of sequence: CDR3 from Table 9
CASSEEVSDDSPLHF

SEQ ID NO: 3821 - protein, 14 aa, synthetic construct
  REGION 1..14: note = Description of sequence: CDR3 from Table 9
CASGRSGEDYGYTF

SEQ ID NO: 3822 - protein, 17 aa, synthetic construct
  REGION 1..17: note = Description of sequence: CDR3 from Table 9
CASSQNPGQGIYSPLHF

SEQ ID NO: 3823 - protein, 16 aa, synthetic construct
  REGION 1..16: note = Description of sequence: CDR3 from Table 9
CASSGQGAYITDTQYF

SEQ ID NO: 3824 - protein, 13 aa, synthetic construct
  REGION 1..13: note = Description of sequence: CDR3 from Table 9
CASSLASGNEQFF

SEQ ID NO: 3825 - protein, 13 aa, synthetic construct
  REGION 1..13: note = Description of sequence: CDR3 from Table 9
CASSKGGNQPQHF

SEQ ID NO: 3826 - protein, 19 aa, synthetic construct
  REGION 1..19: note = Description of sequence: CDR3 from Table 9
CASSLAKMDLPLAKNIQYF

SEQ ID NO: 3827 - protein, 16 aa, synthetic construct
  REGION 1..16: note = Description of sequence: CDR3 from Table 9
CASSQGDRDSGNTIYF

SEQ ID NO: 3828 - protein, 12 aa, synthetic construct
  REGION 1..12: note = Description of sequence: CDR3 from Table 9
CASSLGGDEQYF

SEQ ID NO: 3829 - protein, 16 aa, synthetic construct
  REGION 1..16: note = Description of sequence: CDR3 from Table 9
CASSMPTGTDSYEQYF

SEQ ID NO: 3830 - protein, 15 aa, synthetic construct
  REGION 1..15: note = Description of sequence: CDR3 from Table 9
CSAIVFSRGGDEQFF

SEQ ID NO: 3831 - protein, 14 aa, synthetic construct
  REGION 1..14: note = Description of sequence: CDR3 from Table 9
CASSPAGTDYGYTF

SEQ ID NO: 3832 - protein, 17 aa, synthetic construct
  REGION 1..17: note = Description of sequence: CDR3 from Table 9
CASSSINRDKMNTEAFF

SEQ ID NO: 3833 - protein, 13 aa, synthetic construct
  REGION 1..13: note = Description of sequence: CDR3 from Table 9
CASSPGTSYEQYF

SEQ ID NO: 3834 - protein, 17 aa, synthetic construct
  REGION 1..17: note = Description of sequence: CDR3 from Table 9
CASSLAVGQPGEEEQYF

SEQ ID NO: 3835 - protein, 16 aa, synthetic construct
  REGION 1..16: note = Description of sequence: CDR3 from Table 9
CASSKGAGVFQETQYF

SEQ ID NO: 3836 - protein, 14 aa, synthetic construct
  REGION 1..14: note = Description of sequence: CDR3 from Table 9
CSAHPRDVQETQYF

SEQ ID NO: 3837 - protein, 17 aa, synthetic construct
  REGION 1..17: note = Description of sequence: CDR3 from Table 9
CASSSTREQLIGEKLFF

SEQ ID NO: 3838 - protein, 16 aa, synthetic construct
  REGION 1..16: note = Description of sequence: CDR3 from Table 9
CASSLNRGLNTGELFF

SEQ ID NO: 3839 - protein, 15 aa, synthetic construct
  REGION 1..15: note = Description of sequence: CDR3 from Table 9
CASSFSSLDNYGYTF

SEQ ID NO: 3840 - protein, 17 aa, synthetic construct
  REGION 1..17: note = Description of sequence: CDR3 from Table 9
CASDPDSLIHNTGELFF

SEQ ID NO: 3841 - protein, 18 aa, synthetic construct
  REGION 1..18: note = Description of sequence: CDR3 from Table 9
CASSSTGTGGSYNSPLHF

SEQ ID NO: 3842 - protein, 13 aa, synthetic construct
  REGION 1..13: note = Description of sequence: CDR3 from Table 9
CASSDNDWRLQYF

SEQ ID NO: 3843 - protein, 16 aa, synthetic construct
  REGION 1..16: note = Description of sequence: CDR3 from Table 9
CASSSPTSGADNEQFF

SEQ ID NO: 3844 - protein, 13 aa, synthetic construct
  REGION 1..13: note = Description of sequence: CDR3 from Table 9
CASSYSNGYEQYF

SEQ ID NO: 3845 - protein, 12 aa, synthetic construct
  REGION 1..12: note = Description of sequence: CDR3 from Table 9
CASSPGGYGYTF

SEQ ID NO: 3846 - protein, 16 aa, synthetic construct
  REGION 1..16: note = Description of sequence: CDR3 from Table 9
CASSFWGLPHQETQYF

SEQ ID NO: 3847 - protein, 11 aa, synthetic construct
  REGION 1..11: note = Description of sequence: CDR3 from Table 9
CASSLASEQYF

SEQ ID NO: 3848 - protein, 15 aa, synthetic construct
  REGION 1..15: note = Description of sequence: CDR3 from Table 9
CASSADRTQNYGYTF

SEQ ID NO: 3849 - protein, 15 aa, synthetic construct
  REGION 1..15: note = Description of sequence: CDR3 from Table 9
CSAYPAGDGTGELFF

SEQ ID NO: 3850 - protein, 15 aa, synthetic construct
  REGION 1..15: note = Description of sequence: CDR3 from Table 9
CASSPPLWGVYGYTF

SEQ ID NO: 3851 - protein, 13 aa, synthetic construct
  REGION 1..13: note = Description of sequence: CDR3 from Table 9
CATSRWTGNEQFF

SEQ ID NO: 3852 - protein, 16 aa, synthetic construct
  REGION 1..16: note = Description of sequence: CDR3 from Table 9
CASSLRGEKNNYGYTF

SEQ ID NO: 3853 - protein, 15 aa, synthetic construct
  REGION 1..15: note = Description of sequence: CDR3 from Table 9
CASSIQGNSNQPQHF

SEQ ID NO: 3854 - protein, 15 aa, synthetic construct
  REGION 1..15: note = Description of sequence: CDR3 from Table 9
CASSLVRADGETQYF

SEQ ID NO: 3855 - protein, 15 aa, synthetic construct
  REGION 1..15: note = Description of sequence: CDR3 from Table 9
CASSATGTVNTEAFF

SEQ ID NO: 3856 - protein, 12 aa, synthetic construct
  REGION 1..12: note = Description of sequence: CDR3 from Table 9
CASSIGGYGYTF

SEQ ID NO: 3857 - protein, 12 aa, synthetic construct
  REGION 1..12: note = Description of sequence: CDR3 from Table 9
CASTGTSYEQYF

SEQ ID NO: 3858 - protein, 15 aa, synthetic construct
  REGION 1..15: note = Description of sequence: CDR3 from Table 9
CASSPSGTGFYEQYF

SEQ ID NO: 3859 - protein, 13 aa, synthetic construct
  REGION 1..13: note = Description of sequence: CDR3 from Table 9
CSARVQGAYEQYF

SEQ ID NO: 3860 - protein, 15 aa, synthetic construct
  REGION 1..15: note = Description of sequence: CDR3 from Table 9
CASSQVLGFSYEQYF

SEQ ID NO: 3861 - protein, 13 aa, synthetic construct
  REGION 1..13: note = Description of sequence: CDR3 from Table 9
CASSRKGDSPLHF

SEQ ID NO: 3862 - protein, 16 aa, synthetic construct
  REGION 1..16: note = Description of sequence: CDR3 from Table 9
CASSHDDRGPNEKLFF

SEQ ID NO: 3863 - protein, 12 aa, synthetic construct
  REGION 1..12: note = Description of sequence: CDR3 from Table 9
CASSTGGDTQYF

SEQ ID NO: 3864 - protein, 13 aa, synthetic construct
  REGION 1..13: note = Description of sequence: CDR3 from Table 9
CASSYGHPGEQYF

SEQ ID NO: 3865 - protein, 14 aa, synthetic construct
  REGION 1..14: note = Description of sequence: CDR3 from Table 9
CSALTGLGNYGYTF

SEQ ID NO: 3866 - protein, 13 aa, synthetic construct
  REGION 1..13: note = Description of sequence: CDR3 from Table 9
CASSSDSSYEQYF

SEQ ID NO: 3867 - protein, 16 aa, synthetic construct
  REGION 1..16: note = Description of sequence: CDR3 from Table 9
CASTPGGSSYNSPLHF

SEQ ID NO: 3868 - protein, 12 aa, synthetic construct
  REGION 1..12: note = Description of sequence: CDR3 from Table 9
CASSFNYNEQFF

SEQ ID NO: 3869 - protein, 14 aa, synthetic construct
  REGION 1..14: note = Description of sequence: CDR3 from Table 9
CASRSRGGHSPLHF

SEQ ID NO: 3870 - protein, 12 aa, synthetic construct
  REGION 1..12: note = Description of sequence: CDR3 from Table 9
CASSFGPDEQYF

SEQ ID NO: 3871 - protein, 14 aa, synthetic construct
  REGION 1..14: note = Description of sequence: CDR3 from Table 9
CASSSTGDNSPLHF

SEQ ID NO: 3872 - protein, 15 aa, synthetic construct
  REGION 1..15: note = Description of sequence: CDR3 from Table 9
CASQSWRGMNTEAFF

SEQ ID NO: 3873 - protein, 20 aa, synthetic construct
  REGION 1..20: note = Description of sequence: CDR3 from Table 9
CASSSPWGGTTDTSTDTQYF

SEQ ID NO: 3874 - protein, 14 aa, synthetic construct
  REGION 1..14: note = Description of sequence: CDR3 from Table 9
CASSRGGLTDTQYF

SEQ ID NO: 3875 - protein, 14 aa, synthetic construct
  REGION 1..14: note = Description of sequence: CDR3 from Table 9
CASSFLSSYNEQFF

SEQ ID NO: 3876 - protein, 13 aa, synthetic construct
  REGION 1..13: note = Description of sequence: CDR3 from Table 9
CASSGPEAYEQYF

SEQ ID NO: 3877 - protein, 14 aa, synthetic construct
  REGION 1..14: note = Description of sequence: CDR3 from Table 9
CAISESKGNYGYTF

SEQ ID NO: 3878 - protein, 15 aa, synthetic construct
  REGION 1..15: note = Description of sequence: CDR3 from Table 9
CASSAPGQGNEKLFF

SEQ ID NO: 3879 - protein, 14 aa, synthetic construct
  REGION 1..14: note = Description of sequence: CDR3 from Table 9
CASSIVDRPYEQYF

SEQ ID NO: 3880 - protein, 14 aa, synthetic construct
  REGION 1..14: note = Description of sequence: CDR3 from Table 9
CATSRGTGAGEQYF

SEQ ID NO: 3881 - protein, 13 aa, synthetic construct
  REGION 1..13: note = Description of sequence: CDR3 from Table 9
RASSPRTGGEQYF

SEQ ID NO: 3882 - protein, 14 aa, synthetic construct
  REGION 1..14: note = Description of sequence: CDR3 from Table 9
CASSYLDGAYEQYF

SEQ ID NO: 3883 - protein, 15 aa, synthetic construct
  REGION 1..15: note = Description of sequence: CDR3 from Table 9
CASSTGADLTYEQYF

SEQ ID NO: 3884 - protein, 14 aa, synthetic construct
  REGION 1..14: note = Description of sequence: CDR3 from Table 9
CASSFTRDLYGYTF

SEQ ID NO: 3885 - protein, 17 aa, synthetic construct
  REGION 1..17: note = Description of sequence: CDR3 from Table 9
CASSLAVGETRNSPLHF

SEQ ID NO: 3886 - protein, 13 aa, synthetic construct
  REGION 1..13: note = Description of sequence: CDR3 from Table 9
CASSGTGGYEQYF

SEQ ID NO: 3887 - protein, 17 aa, synthetic construct
  REGION 1..17: note = Description of sequence: CDR3 from Table 9
CASSLAGDRGRNSPLHF

SEQ ID NO: 3888 - protein, 14 aa, synthetic construct
  REGION 1..14: note = Description of sequence: CDR3 from Table 9
CASSPWTGAEKLFF

SEQ ID NO: 3889 - protein, 17 aa, synthetic construct
  REGION 1..17: note = Description of sequence: CDR3 from Table 9
CASSYFFEGLNTGELFF

SEQ ID NO: 3890 - protein, 16 aa, synthetic construct
  REGION 1..16: note = Description of sequence: CDR3 from Table 9
CASSSPSGGRTDTQYF

SEQ ID NO: 3891 - protein, 16 aa, synthetic construct
  REGION 1..16: note = Description of sequence: CDR3 from Table 9
CASSFFASGDTDTQYF

SEQ ID NO: 3892 - protein, 15 aa, synthetic construct
  REGION 1..15: note = Description of sequence: CDR3 from Table 9
CASSLEGTSLNEQFF

SEQ ID NO: 3893 - protein, 14 aa, synthetic construct
  REGION 1..14: note = Description of sequence: CDR3 from Table 9
CASSPDSDHYGYTF

SEQ ID NO: 3894 - protein, 13 aa, synthetic construct
  REGION 1..13: note = Description of sequence: CDR3 from Table 9
CASSQFMNTEAFF

SEQ ID NO: 3895 - protein, 12 aa, synthetic construct
  REGION 1..12: note = Description of sequence: CDR3 from Table 9
CASSLQGNGYTF

SEQ ID NO: 3896 - protein, 13 aa, synthetic construct
  REGION 1..13: note = Description of sequence: CDR3 from Table 9
CASSLGGLSGYTF

SEQ ID NO: 3897 - protein, 13 aa, synthetic construct
  REGION 1..13: note = Description of sequence: CDR3 from Table 9
CASSFQGGTGYTF

SEQ ID NO: 3898 - protein, 12 aa, synthetic construct
  REGION 1..12: note = Description of sequence: CDR3 from Table 9
CASSEDGYEQYF

SEQ ID NO: 3899 - protein, 13 aa, synthetic construct
  REGION 1..13: note = Description of sequence: CDR3 from Table 9
CASKNDGNSPLHF

SEQ ID NO: 3900 - protein, 13 aa, synthetic construct
  REGION 1..13: note = Description of sequence: CDR3 from Table 9
CASSLVTSGEQFF

SEQ ID NO: 3901 - protein, 13 aa, synthetic construct
  REGION 1..13: note = Description of sequence: CDR3 from Table 9
CASSLPDNNEQFF

SEQ ID NO: 3902 - protein, 11 aa, synthetic construct
  REGION 1..11: note = Description of sequence: CDR3 from Table 9
CSATDVWGYTF

SEQ ID NO: 3903 - protein, 14 aa, synthetic construct
  REGION 1..14: note = Description of sequence: CDR3 from Table 9
CASSNLGGTDTQYF

SEQ ID NO: 3904 - protein, 16 aa, synthetic construct
  REGION 1..16: note = Description of sequence: CDR3 from Table 9
CASSSPSQGITGELFF

SEQ ID NO: 3905 - protein, 17 aa, synthetic construct
  REGION 1..17: note = Description of sequence: CDR3 from Table 9
CASSFWRDGATNEKLFF

SEQ ID NO: 3906 - protein, 14 aa, synthetic construct
  REGION 1..14: note = Description of sequence: CDR3 from Table 9
CASSFSAREYGYTF

SEQ ID NO: 3907 - protein, 13 aa, synthetic construct
  REGION 1..13: note = Description of sequence: CDR3 from Table 9
CASSFGANYGYTF

SEQ ID NO: 3908 - protein, 14 aa, synthetic construct
  REGION 1..14: note = Description of sequence: CDR3 from Table 9
CASSLYVYSYEQYF

SEQ ID NO: 3909 - protein, 12 aa, synthetic construct
  REGION 1..12: note = Description of sequence: CDR3 from Table 9
CASSLMGAEAFF

SEQ ID NO: 3910 - protein, 15 aa, synthetic construct
  REGION 1..15: note = Description of sequence: CDR3 from Table 9
CASSQAGDGSYEQYF

SEQ ID NO: 3911 - protein, 13 aa, synthetic construct
  REGION 1..13: note = Description of sequence: CDR3 from Table 9
CASSQLDYNEQFF

SEQ ID NO: 3912 - protein, 15 aa, synthetic construct
  REGION 1..15: note = Description of sequence: CDR3 from Table 9
CASSFWSGGTYEQYF

SEQ ID NO: 3913 - protein, 15 aa, synthetic construct
  REGION 1..15: note = Description of sequence: CDR3 from Table 9
CASSATSGAYNEQFF

SEQ ID NO: 3914 - protein, 14 aa, synthetic construct
  REGION 1..14: note = Description of sequence: CDR3 from Table 9
CSARAVTNTGELFF

SEQ ID NO: 3915 - protein, 13 aa, synthetic construct
  REGION 1..13: note = Description of sequence: CDR3 from Table 9
CASSLQGGGGYTF

SEQ ID NO: 3916 - protein, 11 aa, synthetic construct
  REGION 1..11: note = Description of sequence: CDR3 from Table 9
CASSQVGQGQF

SEQ ID NO: 3917 - protein, 13 aa, synthetic construct
  REGION 1..13: note = Description of sequence: CDR3 from Table 9
CASSVYSTDTQYF

SEQ ID NO: 3918 - protein, 16 aa, synthetic construct
  REGION 1..16: note = Description of sequence: CDR3 from Table 9
CASSYLGRVNKNIQYF

SEQ ID NO: 3919 - protein, 12 aa, synthetic construct
  REGION 1..12: note = Description of sequence: CDR3 from Table 9
CASSLGGTEAFF

SEQ ID NO: 3920 - protein, 15 aa, synthetic construct
  REGION 1..15: note = Description of sequence: CDR3 from Table 9
CSARNRASYNSPLHF

SEQ ID NO: 3921 - protein, 13 aa, synthetic construct
  REGION 1..13: note = Description of sequence: CDR3 from Table 9
CASSQQGFYEQYF

SEQ ID NO: 3922 - protein, 14 aa, synthetic construct
  REGION 1..14: note = Description of sequence: CDR3 from Table 9
CATTPDRGHQPQHF

SEQ ID NO: 3923 - protein, 15 aa, synthetic construct
  REGION 1..15: note = Description of sequence: CDR3 from Table 9
CASSYLEGDNYGYTF

SEQ ID NO: 3924 - protein, 16 aa, synthetic construct
  REGION 1..16: note = Description of sequence: CDR3 from Table 9
CASSLGHFEGNQPQHF

SEQ ID NO: 3925 - protein, 12 aa, synthetic construct
  REGION 1..12: note = Description of sequence: CDR3 from Table 9
CSVTGNNYGYTF

SEQ ID NO: 3926 - protein, 19 aa, synthetic construct
  REGION 1..19: note = Description of sequence: CDR3 from Table 9
CASSSETNWGTGGNQPQHF

SEQ ID NO: 3927 - protein, 14 aa, synthetic construct
  REGION 1..14: note = Description of sequence: CDR3 from Table 9
CASSMTVMNTEAFF

SEQ ID NO: 3928 - protein, 16 aa, synthetic construct
  REGION 1..16: note = Description of sequence: CDR3 from Table 9
CASSVDFGRTYNEQFF

SEQ ID NO: 3929 - protein, 17 aa, synthetic construct
  REGION 1..17: note = Description of sequence: CDR3 from Table 9
CASSLVPSGQANTEAFF

SEQ ID NO: 3930 - protein, 12 aa, synthetic construct
  REGION 1..12: note = Description of sequence: CDR3 from Table 9
CASSYRGVEQYF

SEQ ID NO: 3931 - protein, 15 aa, synthetic construct
  REGION 1..15: note = Description of sequence: CDR3 from Table 9
CASSTEGRSSYEQYF

SEQ ID NO: 3932 - protein, 13 aa, synthetic construct
  REGION 1..13: note = Description of sequence: CDR3 from Table 9
CASSLSPTDTQYF

SEQ ID NO: 3933 - protein, 14 aa, synthetic construct
  REGION 1..14: note = Description of sequence: CDR3 from Table 9
CSARVRGDHNEQFF

SEQ ID NO: 3934 - protein, 17 aa, synthetic construct
  REGION 1..17: note = Description of sequence: CDR3 from Table 9
CASSSYTDKKSPGELFF

SEQ ID NO: 3935 - protein, 11 aa, synthetic construct
  REGION 1..11: note = Description of sequence: CDR3 from Table 9
CASSPTDTQYF

SEQ ID NO: 3936 - protein, 17 aa, synthetic construct
  REGION 1..17: note = Description of sequence: CDR3 from Table 9
CASSLERGMGSNQPQHF

SEQ ID NO: 3937 - protein, 14 aa, synthetic construct
  REGION 1..14: note = Description of sequence: CDR3 from Table 9
CASSDWTGSNEQFF

SEQ ID NO: 3938 - protein, 14 aa, synthetic construct
  REGION 1..14: note = Description of sequence: CDR3 from Table 9
CASSNTGGRETQYF

SEQ ID NO: 3939 - protein, 14 aa, synthetic construct
  REGION 1..14: note = Description of sequence: CDR3 from Table 9
CASSSSGGGTEQFF

SEQ ID NO: 3940 - protein, 13 aa, synthetic construct
  REGION 1..13: note = Description of sequence: CDR3 from Table 9
CATWTGGGSEAFF

SEQ ID NO: 3941 - protein, 16 aa, synthetic construct
  REGION 1..16: note = Description of sequence: CDR3 from Table 9
CASSRYGGPSDNEQFF

SEQ ID NO: 3942 - protein, 13 aa, synthetic construct
  REGION 1..13: note = Description of sequence: CDR3 from Table 9
CAIRDRLNTEAFF

SEQ ID NO: 3943 - protein, 17 aa, synthetic construct
  REGION 1..17: note = Description of sequence: CDR3 from Table 9
CASSQGTSRDRNQPQHF

SEQ ID NO: 3944 - protein, 17 aa, synthetic construct
  REGION 1..17: note = Description of sequence: CDR3 from Table 9
CASTLGGEGRNTGELFF

SEQ ID NO: 3945 - protein, 12 aa, synthetic construct
  REGION 1..12: note = Description of sequence: CDR3 from Table 9
CARGSGGETQYF

SEQ ID NO: 3946 - protein, 14 aa, synthetic construct
  REGION 1..14: note = Description of sequence: CDR3 from Table 9
CASSQSETGDGYTF

SEQ ID NO: 3947 - protein, 13 aa, synthetic construct
  REGION 1..13: note = Description of sequence: CDR3 from Table 9
CASSITFSDTQYF

SEQ ID NO: 3948 - protein, 13 aa, synthetic construct
  REGION 1..13: note = Description of sequence: CDR3 from Table 9
CASSQALDQPQHF

SEQ ID NO: 3949 - protein, 15 aa, synthetic construct
  REGION 1..15: note = Description of sequence: CDR3 from Table 9
CASSNRDRGPYEQYF

SEQ ID NO: 3950 - protein, 17 aa, synthetic construct
  REGION 1..17: note = Description of sequence: CDR3 from Table 9
CSARQTSGGSSYNEQFF

SEQ ID NO: 3951 - protein, 14 aa, synthetic construct
  REGION 1..14: note = Description of sequence: CDR3 from Table 9
CASSSLGLFAEQFF

SEQ ID NO: 3952 - protein, 13 aa, synthetic construct
  REGION 1..13: note = Description of sequence: CDR3 from Table 9
CASSEGQNTEAFF

SEQ ID NO: 3953 - protein, 13 aa, synthetic construct
  REGION 1..13: note = Description of sequence: CDR3 from Table 9
CASSTGPYNEQFF

SEQ ID NO: 3954 - protein, 14 aa, synthetic construct
  REGION 1..14: note = Description of sequence: CDR3 from Table 9
CASSLTGSSDTQYF

SEQ ID NO: 3955 - protein, 16 aa, synthetic construct
  REGION 1..16: note = Description of sequence: CDR3 from Table 9
CASSQAGQGFRTEAFF

SEQ ID NO: 3956 - protein, 15 aa, synthetic construct
  REGION 1..15: note = Description of sequence: CDR3 from Table 9
CASSLGQERPYEQYF

SEQ ID NO: 3957 - protein, 13 aa, synthetic construct
  REGION 1..13: note = Description of sequence: CDR3 from Table 9
CASSFGQGYEQYF

SEQ ID NO: 3958 - protein, 15 aa, synthetic construct
  REGION 1..15: note = Description of sequence: CDR3 from Table 9
CASRPGGGSYNEQFF

SEQ ID NO: 3959 - protein, 15 aa, synthetic construct
  REGION 1..15: note = Description of sequence: CDR3 from Table 9
CASSQEQLSTYEQYF

SEQ ID NO: 3960 - protein, 17 aa, synthetic construct
  REGION 1..17: note = Description of sequence: CDR3 from Table 9
RASSFTAPGLQYNEQFF

SEQ ID NO: 3961 - protein, 14 aa, synthetic construct
  REGION 1..14: note = Description of sequence: CDR3 from Table 9
CASSEFRNVGGYTF

SEQ ID NO: 3962 - protein, 14 aa, synthetic construct
  REGION 1..14: note = Description of sequence: CDR3 from Table 9
CASLKMGGLDEQFF

SEQ ID NO: 3963 - protein, 15 aa, synthetic construct
  REGION 1..15: note = Description of sequence: CDR3 from Table 9
CASRVSASSYNEQFF

SEQ ID NO: 3964 - protein, 9 aa, synthetic construct
  REGION 1..9: note = Description of sequence: NYESO1-V165 from Expermint 1 of Table 10
SLLMWITQV

SEQ ID NO: 3965 - protein, 9 aa, synthetic construct
  REGION 1..9: note = Description of sequence: ADI-SVA from Expermint 1 of Table 10
SVASTITGV

SEQ ID NO: 3966 - protein, 9 aa, synthetic construct
  REGION 1..9: note = Description of sequence: BRA-AG from Expermint 1 of Table 10
WLLPGTSTV

SEQ ID NO: 3967 - protein, 9 aa, synthetic construct
  REGION 1..9: note = Description of sequence: BRA-NA from Expermint 1 of Table 10
WLLPGTSTL

SEQ ID NO: 3968 - protein, 9 aa, synthetic construct
  REGION 1..9: note = Description of sequence: CD1-LLG from Expermint 1 of Table 10
LLGATCMFV

SEQ ID NO: 3969 - protein, 9 aa, synthetic construct
  REGION 1..9: note = Description of sequence: GP100-IMD from Expermint 1 of Table 10
IMDQVPFSV

SEQ ID NO: 3970 - protein, 10 aa, synthetic construct
  REGION 1..10: note = Description of sequence: GP100-AML from Expermint 1 of Table 10
AMLGTHTMEV

SEQ ID NO: 3971 - protein, 9 aa, synthetic construct
  REGION 1..9: note = Description of sequence: GP100-ITD from Expermint 1 of Table 10
ITDQVPFSV

SEQ ID NO: 3972 - protein, 9 aa, synthetic construct
  REGION 1..9: note = Description of sequence: GP100-KTW from Expermint 1 of Table 10
KTWGQYWQV

SEQ ID NO: 3973 - protein, 9 aa, synthetic construct
  REGION 1..9: note = Description of sequence: GP100-YLE from Expermint 1 of Table 10
YLEPGPVTA

SEQ ID NO: 3974 - protein, 9 aa, synthetic construct
  REGION 1..9: note = Description of sequence: GPC-FVG from Expermint 1 of Table 10
FVGEFFTDV

SEQ ID NO: 3975 - protein, 9 aa, synthetic construct
  REGION 1..9: note = Description of sequence: HAFP-FMN from Expermint 1 of Table 10
FMNKFIYEI

SEQ ID NO: 3976 - protein, 10 aa, synthetic construct
  REGION 1..10: note = Description of sequence: HAFP-GLS from Expermint 1 of Table 10
GLSPNLNRFL

SEQ ID NO: 3977 - protein, 9 aa, synthetic construct
  REGION 1..9: note = Description of sequence: MAGEA10-GLY from Expermint 1 of Table 10
GLYDGMEHL

SEQ ID NO: 3978 - protein, 10 aa, synthetic construct
  REGION 1..10: note = Description of sequence: MAGEC2-LLF from Expermint 1 of Table 10
LLFGLALIEV

SEQ ID NO: 3979 - protein, 10 aa, synthetic construct
  REGION 1..10: note = Description of sequence: MART1-A2L from Expermint 1 of Table 10
ELAGIGILTV

SEQ ID NO: 3980 - protein, 9 aa, synthetic construct
  REGION 1..9: note = Description of sequence: MART1-ALM from Expermint 1 of Table 10
ALMDKSLHV

SEQ ID NO: 3981 - protein, 9 aa, synthetic construct
  REGION 1..9: note = Description of sequence: MG50-CMH from Expermint 1 of Table 10
CMHLLLEAV

SEQ ID NO: 3982 - protein, 9 aa, synthetic construct
  REGION 1..9: note = Description of sequence: NYESO1-9A from Expermint 1 of Table 10
SLLMWITQA

SEQ ID NO: 3983 - protein, 9 aa, synthetic construct
  REGION 1..9: note = Description of sequence: TYR-YMD from Expermint 1 of Table 10
YMDGTMSQV

SEQ ID NO: 3984 - protein, 10 aa, synthetic construct
  REGION 1..10: note = Description of sequence: TYR-CLL from Expermint 1 of Table 10
CLLWSFQTSA

SEQ ID NO: 3985 - protein, 9 aa, synthetic construct
  REGION 1..9: note = Description of sequence: WT1-RMF from Expermint 1 of Table 10
RMFPNAPYL

SEQ ID NO: 3986 - protein, 9 aa, synthetic construct
  REGION 1..9: note = Description of sequence: AGL-GLI from Expermint 1 of Table 10
QLIPCMDVV

SEQ ID NO: 3987 - protein, 9 aa, synthetic construct
  REGION 1..9: note = Description of sequence: EF2-ILT from Expermint 1 of Table 10
ILTDITKGV

SEQ ID NO: 3988 - protein, 9 aa, synthetic construct
  REGION 1..9: note = Description of sequence: FBA-ALS from Expermint 1 of Table 10
ALSDHHIYL

SEQ ID NO: 3989 - protein, 9 aa, synthetic construct
  REGION 1..9: note = Description of sequence: HA-VLH from Expermint 1 of Table 10
VLHDDLLEA

SEQ ID NO: 3990 - protein, 9 aa, synthetic construct
  REGION 1..9: note = Description of sequence: KER-ALL from Expermint 1 of Table 10
ALLNIKVKL

SEQ ID NO: 3991 - protein, 9 aa, synthetic construct
  REGION 1..9: note = Description of sequence: L19-ILM from Expermint 1 of Table 10
ILMEHIHKL

SEQ ID NO: 3992 - protein, 9 aa, synthetic construct
  REGION 1..9: note = Description of sequence: PD5-KLS from Expermint 1 of Table 10
KLSEGDLLA

SEQ ID NO: 3993 - protein, 9 aa, synthetic construct
  REGION 1..9: note = Description of sequence: PP1-SII from Expermint 1 of Table 10
SIIGRLLEV

SEQ ID NO: 3994 - protein, 9 aa, synthetic construct
  REGION 1..9: note = Description of sequence: DDX5-YLL from Expermint 1 of Table 10
YLLPAIVHI

SEQ ID NO: 3995 - protein, 9 aa, synthetic construct
  REGION 1..9: note = Description of sequence: SMCY-FID from Expermint 1 of Table 10
FIDSYICQV

SEQ ID NO: 3996 - protein, 9 aa, synthetic construct
  REGION 1..9: note = Description of sequence: SNPG-IML from Expermint 1 of Table 10
IMLEALERV

SEQ ID NO: 3997 - protein, 10 aa, synthetic construct
  REGION 1..10: note = Description of sequence: GAD-RMM from Expermint 1 of Table 10
RMMEYGTTMV

SEQ ID NO: 3998 - protein, 10 aa, synthetic construct
  REGION 1..10: note = Description of sequence: GAD65-VMN from Expermint 1 of Table 10
VMNILLQYVV

SEQ ID NO: 3999 - protein, 10 aa, synthetic construct
  REGION 1..10: note = Description of sequence: GFAP-NLA from Expermint 1 of Table 10
NLAQTDLATV

SEQ ID NO: 4000 - protein, 10 aa, synthetic construct
  REGION 1..10: note = Description of sequence: HCHGA-LLC from Expermint 1 of Table 10
LLCAGQVTAL

SEQ ID NO: 4001 - protein, 10 aa, synthetic construct
  REGION 1..10: note = Description of sequence: HCHGA-TLS from Expermint 1 of Table 10
TLSKPSPMPV

SEQ ID NO: 4002 - protein, 9 aa, synthetic construct
  REGION 1..9: note = Description of sequence: IA2-MVW from Expermint 1 of Table 10
MVWESGCTV

SEQ ID NO: 4003 - protein, 9 aa, synthetic construct
  REGION 1..9: note = Description of sequence: IA2-VIV from Expermint 1 of Table 10
VIVMLTPLV

SEQ ID NO: 4004 - protein, 10 aa, synthetic construct
  REGION 1..10: note = Description of sequence: IA2-SLY from Expermint 1 of Table 10
SLYHVYEVNL

SEQ ID NO: 4005 - protein, 9 aa, synthetic construct
  REGION 1..9: note = Description of sequence: IA2-SLS from Expermint 1 of Table 10
SLSPLQAEL

SEQ ID NO: 4006 - protein, 9 aa, synthetic construct
  REGION 1..9: note = Description of sequence: IA2-SLA from Expermint 1 of Table 10
SLAAGVKLL

SEQ ID NO: 4007 - protein, 9 aa, synthetic construct
  REGION 1..9: note = Description of sequence: IAPP-KLQ from Expermint 1 of Table 10
KLQVFLIVL

SEQ ID NO: 4008 - protein, 9 aa, synthetic construct
  REGION 1..9: note = Description of sequence: IAPP-FLI from Expermint 1 of Table 10
FLIVLSVAL

SEQ ID NO: 4009 - protein, 9 aa, synthetic construct
  REGION 1..9: note = Description of sequence: IGRP-VLF from Expermint 1 of Table 10
VLFGLGFAI

SEQ ID NO: 4010 - protein, 9 aa, synthetic construct
  REGION 1..9: note = Description of sequence: IGRP-RLL from Expermint 1 of Table 10
RLLCALTSL

SEQ ID NO: 4011 - protein, 9 aa, synthetic construct
  REGION 1..9: note = Description of sequence: IGRP-FLW from Expermint 1 of Table 10
FLWSVFMLI

SEQ ID NO: 4012 - protein, 9 aa, synthetic construct
  REGION 1..9: note = Description of sequence: IGRP-FLF from Expermint 1 of Table 10
FLFAVGFYL

SEQ ID NO: 4013 - protein, 9 aa, synthetic construct
  REGION 1..9: note = Description of sequence: INS-HLV from Expermint 1 of Table 10
HLVEALYLV

SEQ ID NO: 4014 - protein, 10 aa, synthetic construct
  REGION 1..10: note = Description of sequence: INS-SHL from Expermint 1 of Table 10
SHLVEALYLV

SEQ ID NO: 4015 - protein, 9 aa, synthetic construct
  REGION 1..9: note = Description of sequence: DRIP-MLY from Expermint 1 of Table 10
MLYQHLLPL

SEQ ID NO: 4016 - protein, 9 aa, synthetic construct
  REGION 1..9: note = Description of sequence: PPI-15-23 from Expermint 1 of Table 10
ALWGPDPAA

SEQ ID NO: 4017 - protein, 10 aa, synthetic construct
  REGION 1..10: note = Description of sequence: PPI-15-24 from Expermint 1 of Table 10
ALWGPDPAAA

SEQ ID NO: 4018 - protein, 9 aa, synthetic construct
  REGION 1..9: note = Description of sequence: PPI-RLL from Expermint 1 of Table 10
RLLPLLALL

SEQ ID NO: 4019 - protein, 9 aa, synthetic construct
  REGION 1..9: note = Description of sequence: PPI-ALWM from Expermint 1 of Table 10
ALWMRLLPL

SEQ ID NO: 4020 - protein, 9 aa, synthetic construct
  REGION 1..9: note = Description of sequence: ZNT8-VAA from Expermint 1 of Table 10
VAANIVLTV

SEQ ID NO: 4021 - protein, 10 aa, synthetic construct
  REGION 1..10: note = Description of sequence: ZNT8-LLI from Expermint 1 of Table 10
LLIDLTSFLL

SEQ ID NO: 4022 - protein, 9 aa, synthetic construct
  REGION 1..9: note = Description of sequence: ZNT8-LLS from Expermint 1 of Table 10
LLSLFSLWL

SEQ ID NO: 4023 - protein, 9 aa, synthetic construct
  REGION 1..9: note = Description of sequence: ZNT8-VVT from Expermint 1 of Table 10
VVTGVLVYL

SEQ ID NO: 4024 - protein, 10 aa, synthetic construct
  REGION 1..10: note = Description of sequence: ZNT8-VMI from Expermint 1 of Table 10
VMIIVSSLAV

SEQ ID NO: 4025 - protein, 10 aa, synthetic construct
  REGION 1..10: note = Description of sequence: ZNT8-ILA from Expermint 1 of Table 10
ILAVDGVLSV

SEQ ID NO: 4026 - protein, 10 aa, synthetic construct
  REGION 1..10: note = Description of sequence: HCV-K1S from Expermint 1 of Table 10
SLVALGINAV

SEQ ID NO: 4027 - protein, 10 aa, synthetic construct
  REGION 1..10: note = Description of sequence: HCV-K1Y from Expermint 1 of Table 10
YLVALGINAV

SEQ ID NO: 4028 - protein, 10 aa, synthetic construct
  REGION 1..10: note = Description of sequence: HCV-K1Y17V from Expermint 1 of Table 10
YLVALGVNAV

SEQ ID NO: 4029 - protein, 10 aa, synthetic construct
  REGION 1..10: note = Description of sequence: HCV-L2I from Expermint 1 of Table 10
KIVALGINAV

SEQ ID NO: 4030 - protein, 10 aa, synthetic construct
  REGION 1..10: note = Description of sequence: HCV-KLV (WT) from Expermint 1 of Table 10
KLVALGINAV

SEQ ID NO: 4031 - protein, 9 aa, synthetic construct
  REGION 1..9: note = Description of sequence: CMV-VLE from Expermint 1 of Table 10
VLEETSVML

SEQ ID NO: 4032 - protein, 9 aa, synthetic construct
  REGION 1..9: note = Description of sequence: CMV-MLN from Expermint 1 of Table 10
MLNIPSINV

SEQ ID NO: 4033 - protein, 9 aa, synthetic construct
  REGION 1..9: note = Description of sequence: CMV-NLV from Expermint 1 of Table 10
NLVPMVATV

SEQ ID NO: 4034 - protein, 9 aa, synthetic construct
  REGION 1..9: note = Description of sequence: EBV-GLC from Expermint 1 of Table 10
GLCTLVAML

SEQ ID NO: 4035 - protein, 9 aa, synthetic construct
  REGION 1..9: note = Description of sequence: EBV-YVL from Expermint 1 of Table 10
YVLDHLIVV

SEQ ID NO: 4036 - protein, 9 aa, synthetic construct
  REGION 1..9: note = Description of sequence: EBV-YLQ from Expermint 1 of Table 10
YLQQNWWTL

SEQ ID NO: 4037 - protein, 9 aa, synthetic construct
  REGION 1..9: note = Description of sequence: EBV-CLG from Expermint 1 of Table 10
CLGGLLTMV

SEQ ID NO: 4038 - protein, 9 aa, synthetic construct
  REGION 1..9: note = Description of sequence: EBV-FLY from Expermint 1 of Table 10
FLYALALLL

SEQ ID NO: 4039 - protein, 10 aa, synthetic construct
  REGION 1..10: note = Description of sequence: HCV-FLP from Expermint 1 of Table 10
FLPSDFFPSV

SEQ ID NO: 4040 - protein, 9 aa, synthetic construct
  REGION 1..9: note = Description of sequence: HBV-WLS from Expermint 1 of Table 10
WLSLLVPFV

SEQ ID NO: 4041 - protein, 10 aa, synthetic construct
  REGION 1..10: note = Description of sequence: HCV-YLL from Expermint 1 of Table 10
YLLPRRGPRL

SEQ ID NO: 4042 - protein, 9 aa, synthetic construct
  REGION 1..9: note = Description of sequence: HCV-CIN from Expermint 1 of Table 10
CINGVCWTV

SEQ ID NO: 4043 - protein, 10 aa, synthetic construct
  REGION 1..10: note = Description of sequence: HCV-LLF from Expermint 1 of Table 10
LLFNILGGWV

SEQ ID NO: 4044 - protein, 9 aa, synthetic construct
  REGION 1..9: note = Description of sequence: HIV-ILK from Expermint 1 of Table 10
ILKEPVHGV

SEQ ID NO: 4045 - protein, 9 aa, synthetic construct
  REGION 1..9: note = Description of sequence: HIV-SLY from Expermint 1 of Table 10
SLYNTVATL

SEQ ID NO: 4046 - protein, 10 aa, synthetic construct
  REGION 1..10: note = Description of sequence: HPV-YML from Expermint 1 of Table 10
YMLDLQPETT

SEQ ID NO: 4047 - protein, 9 aa, synthetic construct
  REGION 1..9: note = Description of sequence: HSV-SLP from Expermint 1 of Table 10
SLPITVYYA

SEQ ID NO: 4048 - protein, 9 aa, synthetic construct
  REGION 1..9: note = Description of sequence: HTLV-GLL from Expermint 1 of Table 10
GLLSLEEEL

SEQ ID NO: 4049 - protein, 9 aa, synthetic construct
  REGION 1..9: note = Description of sequence: HTLV-LLF from Expermint 1 of Table 10
LLFGYPVYV

SEQ ID NO: 4050 - protein, 9 aa, synthetic construct
  REGION 1..9: note = Description of sequence: IV-AIM from Expermint 1 of Table 10
AIMDKNIIL

SEQ ID NO: 4051 - protein, 9 aa, synthetic construct
  REGION 1..9: note = Description of sequence: IV-GIL from Expermint 1 of Table 10
GILGFVFTL

SEQ ID NO: 4052 - protein, 9 aa, synthetic construct
  REGION 1..9: note = Description of sequence: IVPA-FMY from Expermint 1 of Table 10
FMYSDFHFI

SEQ ID NO: 4053 - protein, 10 aa, synthetic construct
  REGION 1..10: note = Description of sequence: MEA-SMY from Expermint 1 of Table 10
SMYRVFEVGV

SEQ ID NO: 4054 - protein, 10 aa, synthetic construct
  REGION 1..10: note = Description of sequence: MEA-ILP from Expermint 1 of Table 10
ILPGQDLQYV

SEQ ID NO: 4055 - protein, 9 aa, synthetic construct
  REGION 1..9: note = Description of sequence: YFV-LLW from Expermint 1 of Table 10
LLWNGPMAV

SEQ ID NO: 4056 - protein, 10 aa, synthetic construct
  REGION 1..10: note = Description of sequence: ALADH-VLM from Expermint 1 of Table 10
VLMGGVPGVE

SEQ ID NO: 4057 - protein, 9 aa, synthetic construct
  REGION 1..9: note = Description of sequence: GLNS-GLL from Expermint 1 of Table 10
GLLHHAPSL

SEQ ID NO: 4058 - protein, 9 aa, synthetic construct
  REGION 1..9: note = Description of sequence: SODA-DMW from Expermint 1 of Table 10
DMWEHAFYL

SEQ ID NO: 4059 - skipped

SEQ ID NO: 4060 - protein, 9 aa, synthetic construct
  REGION 1..9: note = Description of sequence: NYESO1-V165 from Experiment 2 of Table 10
SLLMWITQV

SEQ ID NO: 4061 - protein, 9 aa, synthetic construct
  REGION 1..9: note = Description of sequence: ADI-SVA from Experiment 2 of Table 10
SVASTITGV

SEQ ID NO: 4062 - protein, 9 aa, synthetic construct
  REGION 1..9: note = Description of sequence: BRA-AG from Experiment 2 of Table 10
WLLPGTSTV

SEQ ID NO: 4063 - protein, 9 aa, synthetic construct
  REGION 1..9: note = Description of sequence: BRA-NA from Experiment 2 of Table 10
WLLPGTSTL

SEQ ID NO: 4064 - protein, 9 aa, synthetic construct
  REGION 1..9: note = Description of sequence: CD1-LLG from Experiment 2 of Table 10
LLGATCMFV

SEQ ID NO: 4065 - protein, 9 aa, synthetic construct
  REGION 1..9: note = Description of sequence: GP100-IMD from Experiment 2 of Table 10
IMDQVPFSV

SEQ ID NO: 4066 - protein, 10 aa, synthetic construct
  REGION 1..10: note = Description of sequence: GP100-AML from Experiment 2 of Table 10
AMLGTHTMEV

SEQ ID NO: 4067 - protein, 9 aa, synthetic construct
  REGION 1..9: note = Description of sequence: GP100-ITD from Experiment 2 of Table 10
ITDQVPFSV

SEQ ID NO: 4068 - protein, 9 aa, synthetic construct
  REGION 1..9: note = Description of sequence: GP100-KTW from Experiment 2 of Table 10
KTWGQYWQV

SEQ ID NO: 4069 - protein, 9 aa, synthetic construct
  REGION 1..9: note = Description of sequence: GP100-YLE from Experiment 2 of Table 10
YLEPGPVTA

SEQ ID NO: 4070 - protein, 9 aa, synthetic construct
  REGION 1..9: note = Description of sequence: GPC-FVG from Experiment 2 of Table 10
FVGEFFTDV

SEQ ID NO: 4071 - protein, 9 aa, synthetic construct
  REGION 1..9: note = Description of sequence: HAFP-FMN from Experiment 2 of Table 10
FMNKFIYEI

SEQ ID NO: 4072 - protein, 10 aa, synthetic construct
  REGION 1..10: note = Description of sequence: HAFP-GLS from Experiment 2 of Table 10
GLSPNLNRFL

SEQ ID NO: 4073 - protein, 9 aa, synthetic construct
  REGION 1..9: note = Description of sequence: MAGEA10-GLY from Experiment 2 of Table 10
GLYDGMEHL

SEQ ID NO: 4074 - protein, 10 aa, synthetic construct
  REGION 1..10: note = Description of sequence: MAGEC2-LLF from Experiment 2 of Table 10
LLFGLALIEV

SEQ ID NO: 4075 - protein, 10 aa, synthetic construct
  REGION 1..10: note = Description of sequence: MART1-A2L from Experiment 2 of Table 10
ELAGIGILTV

SEQ ID NO: 4076 - protein, 9 aa, synthetic construct
  REGION 1..9: note = Description of sequence: MART1-ALM from Experiment 2 of Table 10
ALMDKSLHV

SEQ ID NO: 4077 - protein, 9 aa, synthetic construct
  REGION 1..9: note = Description of sequence: MG50-CMH from Experiment 2 of Table 10
CMHLLLEAV

SEQ ID NO: 4078 - protein, 9 aa, synthetic construct
  REGION 1..9: note = Description of sequence: NYESO1-9A from Experiment 2 of Table 10
SLLMWITQA

SEQ ID NO: 4079 - protein, 9 aa, synthetic construct
  REGION 1..9: note = Description of sequence: TYR-YMD from Experiment 2 of Table 10
YMDGTMSQV

SEQ ID NO: 4080 - protein, 10 aa, synthetic construct
  REGION 1..10: note = Description of sequence: TYR-CLL from Experiment 2 of Table 10
CLLWSFQTSA

SEQ ID NO: 4081 - protein, 9 aa, synthetic construct
  REGION 1..9: note = Description of sequence: WT1-RMF from Experiment 2 of Table 10
RMFPNAPYL

SEQ ID NO: 4082 - protein, 9 aa, synthetic construct
  REGION 1..9: note = Description of sequence: AGL-GLI from Experiment 2 of Table 10
QLIPCMDVV

SEQ ID NO: 4083 - protein, 9 aa, synthetic construct
  REGION 1..9: note = Description of sequence: EF2-ILT from Experiment 2 of Table 10
ILTDITKGV

SEQ ID NO: 4084 - protein, 9 aa, synthetic construct
  REGION 1..9: note = Description of sequence: FBA-ALS from Experiment 2 of Table 10
ALSDHHIYL

SEQ ID NO: 4085 - protein, 9 aa, synthetic construct
  REGION 1..9: note = Description of sequence: HA-VLH from Experiment 2 of Table 10
VLHDDLLEA

SEQ ID NO: 4086 - protein, 9 aa, synthetic construct
  REGION 1..9: note = Description of sequence: KER-ALL from Experiment 2 of Table 10
ALLNIKVKL

SEQ ID NO: 4087 - protein, 9 aa, synthetic construct
  REGION 1..9: note = Description of sequence: L19-ILM from Experiment 2 of Table 10
ILMEHIHKL

SEQ ID NO: 4088 - protein, 9 aa, synthetic construct
  REGION 1..9: note = Description of sequence: PD5-KLS from Experiment 2 of Table 10
KLSEGDLLA

SEQ ID NO: 4089 - protein, 9 aa, synthetic construct
  REGION 1..9: note = Description of sequence: PP1-SII from Experiment 2 of Table 10
SIIGRLLEV

SEQ ID NO: 4090 - protein, 9 aa, synthetic construct
  REGION 1..9: note = Description of sequence: DDX5-YLL from Experiment 2 of Table 10
YLLPAIVHI

SEQ ID NO: 4091 - protein, 9 aa, synthetic construct
  REGION 1..9: note = Description of sequence: SMCY-FID from Experiment 2 of Table 10
FIDSYICQV

SEQ ID NO: 4092 - protein, 9 aa, synthetic construct
  REGION 1..9: note = Description of sequence: SNPG-IML from Experiment 2 of Table 10
IMLEALERV

SEQ ID NO: 4093 - protein, 10 aa, synthetic construct
  REGION 1..10: note = Description of sequence: GAD-RMM from Experiment 2 of Table 10
RMMEYGTTMV

SEQ ID NO: 4094 - protein, 10 aa, synthetic construct
  REGION 1..10: note = Description of sequence: GAD65-VMN from Experiment 2 of Table 10
VMNILLQYVV

SEQ ID NO: 4095 - protein, 10 aa, synthetic construct
  REGION 1..10: note = Description of sequence: GFAP-NLA from Experiment 2 of Table 10
NLAQTDLATV

SEQ ID NO: 4096 - protein, 10 aa, synthetic construct
  REGION 1..10: note = Description of sequence: HCHGA-LLC from Experiment 2 of Table 10
LLCAGQVTAL

SEQ ID NO: 4097 - protein, 10 aa, synthetic construct
  REGION 1..10: note = Description of sequence: HCHGA-TLS from Experiment 2 of Table 10
TLSKPSPMPV

SEQ ID NO: 4098 - protein, 9 aa, synthetic construct
  REGION 1..9: note = Description of sequence: IA2-MVW from Experiment 2 of Table 10
MVWESGCTV

SEQ ID NO: 4099 - protein, 9 aa, synthetic construct
  REGION 1..9: note = Description of sequence: IA2-VIV from Experiment 2 of Table 10
VIVMLTPLV

SEQ ID NO: 4100 - protein, 10 aa, synthetic construct
  REGION 1..10: note = Description of sequence: IA2-SLY from Experiment 2 of Table 10
SLYHVYEVNL

SEQ ID NO: 4101 - protein, 9 aa, synthetic construct
  REGION 1..9: note = Description of sequence: IA2-SLS from Experiment 2 of Table 10
SLSPLQAEL

SEQ ID NO: 4102 - protein, 9 aa, synthetic construct
  REGION 1..9: note = Description of sequence: IA2-SLA from Experiment 2 of Table 10
SLAAGVKLL

SEQ ID NO: 4103 - protein, 9 aa, synthetic construct
  REGION 1..9: note = Description of sequence: IAPP-KLQ from Experiment 2 of Table 10
KLQVFLIVL

SEQ ID NO: 4104 - protein, 9 aa, synthetic construct
  REGION 1..9: note = Description of sequence: IAPP-FLI from Experiment 2 of Table 10
FLIVLSVAL

SEQ ID NO: 4105 - protein, 9 aa, synthetic construct
  REGION 1..9: note = Description of sequence: IGRP-VLF from Experiment 2 of Table 10
VLFGLGFAI

SEQ ID NO: 4106 - protein, 9 aa, synthetic construct
  REGION 1..9: note = Description of sequence: IGRP-RLL from Experiment 2 of Table 10
RLLCALTSL

SEQ ID NO: 4107 - protein, 9 aa, synthetic construct
  REGION 1..9: note = Description of sequence: IGRP-FLW from Experiment 2 of Table 10
FLWSVFMLI

SEQ ID NO: 4108 - protein, 9 aa, synthetic construct
  REGION 1..9: note = Description of sequence: IGRP-FLF from Experiment 2 of Table 10
FLFAVGFYL

SEQ ID NO: 4109 - protein, 9 aa, synthetic construct
  REGION 1..9: note = Description of sequence: INS-HLV from Experiment 2 of Table 10
HLVEALYLV

SEQ ID NO: 4110 - protein, 10 aa, synthetic construct
  REGION 1..10: note = Description of sequence: INS-SHL from Experiment 2 of Table 10
SHLVEALYLV

SEQ ID NO: 4111 - protein, 9 aa, synthetic construct
  REGION 1..9: note = Description of sequence: DRIP-MLY from Experiment 2 of Table 10
MLYQHLLPL

SEQ ID NO: 4112 - protein, 9 aa, synthetic construct
  REGION 1..9: note = Description of sequence: PPI-15-23 from Experiment 2 of Table 10
ALWGPDPAA

SEQ ID NO: 4113 - protein, 10 aa, synthetic construct
  REGION 1..10: note = Description of sequence: PPI-15-24 from Experiment 2 of Table 10
ALWGPDPAAA

SEQ ID NO: 4114 - protein, 9 aa, synthetic construct
  REGION 1..9: note = Description of sequence: PPI-RLL from Experiment 2 of Table 10
RLLPLLALL

SEQ ID NO: 4115 - protein, 9 aa, synthetic construct
  REGION 1..9: note = Description of sequence: PPI-ALWM from Experiment 2 of Table 10
ALWMRLLPL

SEQ ID NO: 4116 - protein, 9 aa, synthetic construct
  REGION 1..9: note = Description of sequence: ZNT8-VAA from Experiment 2 of Table 10
VAANIVLTV

SEQ ID NO: 4117 - protein, 10 aa, synthetic construct
  REGION 1..10: note = Description of sequence: ZNT8-LLI from Experiment 2 of Table 10
LLIDLTSFLL

SEQ ID NO: 4118 - protein, 9 aa, synthetic construct
  REGION 1..9: note = Description of sequence: ZNT8-LLS from Experiment 2 of Table 10
LLSLFSLWL

SEQ ID NO: 4119 - protein, 9 aa, synthetic construct
  REGION 1..9: note = Description of sequence: ZNT8-VVT from Experiment 2 of Table 10
VVTGVLVYL

SEQ ID NO: 4120 - protein, 10 aa, synthetic construct
  REGION 1..10: note = Description of sequence: ZNT8-VMI from Experiment 2 of Table 10
VMIIVSSLAV

SEQ ID NO: 4121 - protein, 10 aa, synthetic construct
  REGION 1..10: note = Description of sequence: ZNT8-ILA from Experiment 2 of Table 10
ILAVDGVLSV

SEQ ID NO: 4122 - protein, 10 aa, synthetic construct
  REGION 1..10: note = Description of sequence: HCV-K1S from Experiment 2 of Table 10
SLVALGINAV

SEQ ID NO: 4123 - protein, 10 aa, synthetic construct
  REGION 1..10: note = Description of sequence: HCV-K1Y from Experiment 2 of Table 10
YLVALGINAV

SEQ ID NO: 4124 - protein, 10 aa, synthetic construct
  REGION 1..10: note = Description of sequence: HCV-K1Y17V from Experiment 2 of Table 10
YLVALGVNAV

SEQ ID NO: 4125 - protein, 10 aa, synthetic construct
  REGION 1..10: note = Description of sequence: HCV-L2I from Experiment 2 of Table 10
KIVALGINAV

SEQ ID NO: 4126 - protein, 10 aa, synthetic construct
  REGION 1..10: note = Description of sequence: HCV-KLV (WT) from Experiment 2 of Table 10
KLVALGINAV

SEQ ID NO: 4127 - protein, 9 aa, synthetic construct
  REGION 1..9: note = Description of sequence: CMV-VLE from Experiment 2 of Table 10
VLEETSVML

SEQ ID NO: 4128 - protein, 9 aa, synthetic construct
  REGION 1..9: note = Description of sequence: CMV-MLN from Experiment 2 of Table 10
MLNIPSINV

SEQ ID NO: 4129 - protein, 9 aa, synthetic construct
  REGION 1..9: note = Description of sequence: CMV-NLV from Experiment 2 of Table 10
NLVPMVATV

SEQ ID NO: 4130 - protein, 9 aa, synthetic construct
  REGION 1..9: note = Description of sequence: EBV-GLC from Experiment 2 of Table 10
GLCTLVAML

SEQ ID NO: 4131 - protein, 9 aa, synthetic construct
  REGION 1..9: note = Description of sequence: EBV-YVL from Experiment 2 of Table 10
YVLDHLIVV

SEQ ID NO: 4132 - protein, 9 aa, synthetic construct
  REGION 1..9: note = Description of sequence: EBV-YLQ from Experiment 2 of Table 10
YLQQNWWTL

SEQ ID NO: 4133 - protein, 9 aa, synthetic construct
  REGION 1..9: note = Description of sequence: EBV-CLG from Experiment 2 of Table 10
CLGGLLTMV

SEQ ID NO: 4134 - protein, 9 aa, synthetic construct
  REGION 1..9: note = Description of sequence: EBV-FLY from Experiment 2 of Table 10
FLYALALLL

SEQ ID NO: 4135 - protein, 10 aa, synthetic construct
  REGION 1..10: note = Description of sequence: HCV-FLP from Experiment 2 of Table 10
FLPSDFFPSV

SEQ ID NO: 4136 - protein, 9 aa, synthetic construct
  REGION 1..9: note = Description of sequence: HBV-WLS from Experiment 2 of Table 10
WLSLLVPFV

SEQ ID NO: 4137 - protein, 10 aa, synthetic construct
  REGION 1..10: note = Description of sequence: HCV-YLL from Experiment 2 of Table 10
YLLPRRGPRL

SEQ ID NO: 4138 - protein, 9 aa, synthetic construct
  REGION 1..9: note = Description of sequence: HCV-CIN from Experiment 2 of Table 10
CINGVCWTV

SEQ ID NO: 4139 - protein, 10 aa, synthetic construct
  REGION 1..10: note = Description of sequence: HCV-LLF from Experiment 2 of Table 10
LLFNILGGWV

SEQ ID NO: 4140 - protein, 9 aa, synthetic construct
  REGION 1..9: note = Description of sequence: HIV-ILK from Experiment 2 of Table 10
ILKEPVHGV

SEQ ID NO: 4141 - protein, 9 aa, synthetic construct
  REGION 1..9: note = Description of sequence: HIV-SLY from Experiment 2 of Table 10
SLYNTVATL

SEQ ID NO: 4142 - protein, 10 aa, synthetic construct
  REGION 1..10: note = Description of sequence: HPV-YML from Experiment 2 of Table 10
YMLDLQPETT

SEQ ID NO: 4143 - protein, 9 aa, synthetic construct
  REGION 1..9: note = Description of sequence: HSV-SLP from Experiment 2 of Table 10
SLPITVYYA

SEQ ID NO: 4144 - protein, 9 aa, synthetic construct
  REGION 1..9: note = Description of sequence: HTLV-GLL from Experiment 2 of Table 10
GLLSLEEEL

SEQ ID NO: 4145 - protein, 9 aa, synthetic construct
  REGION 1..9: note = Description of sequence: HTLV-LLF from Experiment 2 of Table 10
LLFGYPVYV

SEQ ID NO: 4146 - protein, 9 aa, synthetic construct
  REGION 1..9: note = Description of sequence: IV-AIM from Experiment 2 of Table 10
AIMDKNIIL

SEQ ID NO: 4147 - protein, 9 aa, synthetic construct
  REGION 1..9: note = Description of sequence: IV-GIL from Experiment 2 of Table 10
GILGFVFTL

SEQ ID NO: 4148 - protein, 9 aa, synthetic construct
  REGION 1..9: note = Description of sequence: IVPA-FMY from Experiment 2 of Table 10
FMYSDFHFI

SEQ ID NO: 4149 - protein, 10 aa, synthetic construct
  REGION 1..10: note = Description of sequence: MEA-SMY from Experiment 2 of Table 10
SMYRVFEVGV

SEQ ID NO: 4150 - protein, 10 aa, synthetic construct
  REGION 1..10: note = Description of sequence: MEA-ILP from Experiment 2 of Table 10
ILPGQDLQYV

SEQ ID NO: 4151 - protein, 9 aa, synthetic construct
  REGION 1..9: note = Description of sequence: YFV-LLW from Experiment 2 of Table 10
LLWNGPMAV

SEQ ID NO: 4152 - protein, 10 aa, synthetic construct
  REGION 1..10: note = Description of sequence: ALADH-VLM from Experiment 2 of Table 10
VLMGGVPGVE

SEQ ID NO: 4153 - protein, 9 aa, synthetic construct
  REGION 1..9: note = Description of sequence: GLNS-GLL from Experiment 2 of Table 10
GLLHHAPSL

SEQ ID NO: 4154 - protein, 9 aa, synthetic construct
  REGION 1..9: note = Description of sequence: SODA-DMW from Experiment 2 of Table 10
DMWEHAFYL

SEQ ID NO: 4155 - protein, 10 aa, synthetic construct
  REGION 1..10: note = Description of sequence: HCV-A9N from Experiment 2 of Table 10
KLVALGINNV

SEQ ID NO: 4156 - protein, 9 aa, synthetic construct
  REGION 1..9: note = Description of sequence: WDR46 from Experiment 3 of Table 10
FLTYLDVSV

SEQ ID NO: 4157 - protein, 9 aa, synthetic construct
  REGION 1..9: note = Description of sequence: AHNAK from Experiment 3 of Table 10
SMPDFDLHL

SEQ ID NO: 4158 - protein, 10 aa, synthetic construct
  REGION 1..10: note = Description of sequence: COL18A1 from Experiment 3 of Table 10
VLLGVKLSGV

SEQ ID NO: 4159 - protein, 9 aa, synthetic construct
  REGION 1..9: note = Description of sequence: ERBB2 from Experiment 3 of Table 10
ALIHHNTHL

SEQ ID NO: 4160 - protein, 10 aa, synthetic construct
  REGION 1..10: note = Description of sequence: TEAD1 (VLE) from Experiment 3 of Table 10
VLENFTILLV

SEQ ID NO: 4161 - protein, 10 aa, synthetic construct
  REGION 1..10: note = Description of sequence: TEAD1 (SVL) from Experiment 3 of Table 10
SVLENFTILL

SEQ ID NO: 4162 - protein, 9 aa, synthetic construct
  REGION 1..9: note = Description of sequence: NSDHL from Experiment 3 of Table 10
ILTGLNYEA

SEQ ID NO: 4163 - protein, 9 aa, synthetic construct
  REGION 1..9: note = Description of sequence: GANAB from Experiment 3 of Table 10
ALYGSVPVL

SEQ ID NO: 4164 - protein, 9 aa, synthetic construct
  REGION 1..9: note = Description of sequence: FNDC3B from Experiment 3 of Table 10
VVLSWAPPV

SEQ ID NO: 4165 - protein, 10 aa, synthetic construct
  REGION 1..10: note = Description of sequence: GCN1L1 from Experiment 3 of Table 10
ALLETLSLLL

SEQ ID NO: 4166 - protein, 9 aa, synthetic construct
  REGION 1..9: note = Description of sequence: MLL2 from Experiment 3 of Table 10
ALSPVIPLI

SEQ ID NO: 4167 - protein, 10 aa, synthetic construct
  REGION 1..10: note = Description of sequence: SMARCD3 from Experiment 3 of Table 10
KLFEFLVHGV

SEQ ID NO: 4168 - protein, 9 aa, synthetic construct
  REGION 1..9: note = Description of sequence: GNL3L from Experiment 3 of Table 10
NLNRCSVPV

SEQ ID NO: 4169 - protein, 9 aa, synthetic construct
  REGION 1..9: note = Description of sequence: USP28 from Experiment 3 of Table 10
LIIPCIHLI

SEQ ID NO: 4170 - protein, 9 aa, synthetic construct
  REGION 1..9: note = Description of sequence: MRM1 from Experiment 3 of Table 10
LLFGMTPCL

SEQ ID NO: 4171 - protein, 9 aa, synthetic construct
  REGION 1..9: note = Description of sequence: SNX24 from Experiment 3 of Table 10
KLSHQPVLL

SEQ ID NO: 4172 - protein, 9 aa, synthetic construct
  REGION 1..9: note = Description of sequence: PGM5 from Experiment 3 of Table 10
AVGSHVYSV

SEQ ID NO: 4173 - protein, 9 aa, synthetic construct
  REGION 1..9: note = Description of sequence: SEC24A from Experiment 3 of Table 10
FLYNPLTRV

SEQ ID NO: 4174 - protein, 9 aa, synthetic construct
  REGION 1..9: note = Description of sequence: AKAP13 from Experiment 3 of Table 10
KLMNIQQQL

SEQ ID NO: 4175 - protein, 9 aa, synthetic construct
  REGION 1..9: note = Description of sequence: PABPC1 from Experiment 3 of Table 10
MLGERLFPL

SEQ ID NO: 4176 - protein, 9 aa, synthetic construct
  REGION 1..9: note = Description of sequence: WDR46 T3I from Experiment 3 of Table 10
FLIYLDVSV

SEQ ID NO: 4177 - protein, 9 aa, synthetic construct
  REGION 1..9: note = Description of sequence: AHNAK S1F from Experiment 3 of Table 10
FMPDFDLHL

SEQ ID NO: 4178 - protein, 10 aa, synthetic construct
  REGION 1..10: note = Description of sequence: COL18A1 S8F from Experiment 3 of Table 10
VLLGVKLFGV

SEQ ID NO: 4179 - protein, 9 aa, synthetic construct
  REGION 1..9: note = Description of sequence: ERBB2 H8Y from Experiment 3 of Table 10
ALIHHNTYL

SEQ ID NO: 4180 - protein, 10 aa, synthetic construct
  REGION 1..10: note = Description of sequence: TEAD1 L8F from Experiment 3 of Table 10
VLENFTIFLV

SEQ ID NO: 4181 - protein, 10 aa, synthetic construct
  REGION 1..10: note = Description of sequence: TEAD1 L9F from Experiment 3 of Table 10
SVLENFTIFL

SEQ ID NO: 4182 - protein, 9 aa, synthetic construct
  REGION 1..9: note = Description of sequence: NSDHL A9V from Experiment 3 of Table 10
ILTGLNYEV

SEQ ID NO: 4183 - protein, 9 aa, synthetic construct
  REGION 1..9: note = Description of sequence: GANAB S5F from Experiment 3 of Table 10
ALYGFVPVL

SEQ ID NO: 4184 - protein, 9 aa, synthetic construct
  REGION 1..9: note = Description of sequence: FNDC3B L3M from Experiment 3 of Table 10
VVMSWAPPV

SEQ ID NO: 4185 - protein, 10 aa, synthetic construct
  REGION 1..10: note = Description of sequence: GCN1L1 L6P from Experiment 3 of Table 10
ALLETPSLLL

SEQ ID NO: 4186 - protein, 9 aa, synthetic construct
  REGION 1..9: note = Description of sequence: MLL2 L8H from Experiment 3 of Table 10
ALSPVIPHI

SEQ ID NO: 4187 - protein, 10 aa, synthetic construct
  REGION 1..10: note = Description of sequence: SMARCD3 H8Y from Experiment 3 of Table 10
KLFEFLVYGV

SEQ ID NO: 4188 - protein, 9 aa, synthetic construct
  REGION 1..9: note = Description of sequence: GNL3L R4C from Experiment 3 of Table 10
NLNCCSVPV

SEQ ID NO: 4189 - protein, 9 aa, synthetic construct
  REGION 1..9: note = Description of sequence: USP28 C5F from Experiment 3 of Table 10
LIIPFIHLI

SEQ ID NO: 4190 - protein, 9 aa, synthetic construct
  REGION 1..9: note = Description of sequence: MRM1 T6P from Experiment 3 of Table 10
LLFGMPPCL

SEQ ID NO: 4191 - protein, 9 aa, synthetic construct
  REGION 1..9: note = Description of sequence: SNX24 P6L from Experiment 3 of Table 10
KLSHQLVLL

SEQ ID NO: 4192 - protein, 9 aa, synthetic construct
  REGION 1..9: note = Description of sequence: PGM5 H5Y from Experiment 3 of Table 10
AVGSYVYSV

SEQ ID NO: 4193 - protein, 9 aa, synthetic construct
  REGION 1..9: note = Description of sequence: SEC24A P5L from Experiment 3 of Table 10
FLYNLLTRV

SEQ ID NO: 4194 - protein, 9 aa, synthetic construct
  REGION 1..9: note = Description of sequence: AKAP13 Q8K from Experiment 3 of Table 10
KLMNIQQKL

SEQ ID NO: 4195 - protein, 9 aa, synthetic construct
  REGION 1..9: note = Description of sequence: PABPC1 R5Q from Experiment 3 of Table 10
MLGEQLFPL

SEQ ID NO: 4196 - protein, 10 aa, synthetic construct
  REGION 1..10: note = Description of sequence: HCV-KLV (WT) from Experiment 3 of Table 10
KLVALGINAV

SEQ ID NO: 4197 - protein, 10 aa, synthetic construct
  REGION 1..10: note = Description of sequence: HCV-KLV (WT) from Experiment 3 of Table 10
KLVALGINAV

SEQ ID NO: 4198-4199 - skipped (2 entries)

SEQ ID NO: 4200 - protein, 9 aa, synthetic construct
  REGION 1..9: note = Description of sequence: WDR46 from Experiment 4 of Table 10
FLTYLDVSV

SEQ ID NO: 4201 - protein, 9 aa, synthetic construct
  REGION 1..9: note = Description of sequence: AHNAK from Experiment 4 of Table 10
SMPDFDLHL

SEQ ID NO: 4202 - protein, 10 aa, synthetic construct
  REGION 1..10: note = Description of sequence: COL18A1 from Experiment 4 of Table 10
VLLGVKLSGV

SEQ ID NO: 4203 - protein, 9 aa, synthetic construct
  REGION 1..9: note = Description of sequence: ERBB2 from Experiment 4 of Table 10
ALIHHNTHL

SEQ ID NO: 4204 - protein, 10 aa, synthetic construct
  REGION 1..10: note = Description of sequence: TEAD1 (VLE) from Experiment 4 of Table 10
VLENFTILLV

SEQ ID NO: 4205 - protein, 10 aa, synthetic construct
  REGION 1..10: note = Description of sequence: TEAD1 (SVL) from Experiment 4 of Table 10
SVLENFTILL

SEQ ID NO: 4206 - protein, 9 aa, synthetic construct
  REGION 1..9: note = Description of sequence: NSDHL from Experiment 4 of Table 10
ILTGLNYEA

SEQ ID NO: 4207 - protein, 9 aa, synthetic construct
  REGION 1..9: note = Description of sequence: GANAB from Experiment 4 of Table 10
ALYGSVPVL

SEQ ID NO: 4208 - protein, 9 aa, synthetic construct
  REGION 1..9: note = Description of sequence: FNDC3B from Experiment 4 of Table 10
VVLSWAPPV

SEQ ID NO: 4209 - protein, 10 aa, synthetic construct
  REGION 1..10: note = Description of sequence: GCN1L1 from Experiment 4 of Table 10
ALLETLSLLL

SEQ ID NO: 4210 - protein, 9 aa, synthetic construct
  REGION 1..9: note = Description of sequence: MLL2 from Experiment 4 of Table 10
ALSPVIPLI

SEQ ID NO: 4211 - protein, 10 aa, synthetic construct
  REGION 1..10: note = Description of sequence: SMARCD3 from Experiment 4 of Table 10
KLFEFLVHGV

SEQ ID NO: 4212 - protein, 9 aa, synthetic construct
  REGION 1..9: note = Description of sequence: GNL3L from Experiment 4 of Table 10
NLNRCSVPV

SEQ ID NO: 4213 - protein, 9 aa, synthetic construct
  REGION 1..9: note = Description of sequence: USP28 from Experiment 4 of Table 10
LIIPCIHLI

SEQ ID NO: 4214 - protein, 9 aa, synthetic construct
  REGION 1..9: note = Description of sequence: MRM1 from Experiment 4 of Table 10
LLFGMTPCL

SEQ ID NO: 4215 - protein, 9 aa, synthetic construct
  REGION 1..9: note = Description of sequence: SNX24 from Experiment 4 of Table 10
KLSHQPVLL

SEQ ID NO: 4216 - protein, 9 aa, synthetic construct
  REGION 1..9: note = Description of sequence: PGM5 from Experiment 4 of Table 10
AVGSHVYSV

SEQ ID NO: 4217 - protein, 9 aa, synthetic construct
  REGION 1..9: note = Description of sequence: SEC24A from Experiment 4 of Table 10
FLYNPLTRV

SEQ ID NO: 4218 - protein, 9 aa, synthetic construct
  REGION 1..9: note = Description of sequence: AKAP13 from Experiment 4 of Table 10
KLMNIQQQL

SEQ ID NO: 4219 - protein, 9 aa, synthetic construct
  REGION 1..9: note = Description of sequence: PABPC1 from Experiment 4 of Table 10
MLGERLFPL

SEQ ID NO: 4220 - protein, 9 aa, synthetic construct
  REGION 1..9: note = Description of sequence: WDR46 T3I from Experiment 4 of Table 10
FLIYLDVSV

SEQ ID NO: 4221 - protein, 9 aa, synthetic construct
  REGION 1..9: note = Description of sequence: AHNAK S1F from Experiment 4 of Table 10
FMPDFDLHL

SEQ ID NO: 4222 - protein, 10 aa, synthetic construct
  REGION 1..10: note = Description of sequence: COL18A1 S8F from Experiment 4 of Table 10
VLLGVKLFGV

SEQ ID NO: 4223 - protein, 9 aa, synthetic construct
  REGION 1..9: note = Description of sequence: ERBB2 H8Y from Experiment 4 of Table 10
ALIHHNTYL

SEQ ID NO: 4224 - protein, 10 aa, synthetic construct
  REGION 1..10: note = Description of sequence: TEAD1 L8F from Experiment 4 of Table 10
VLENFTIFLV

SEQ ID NO: 4225 - protein, 10 aa, synthetic construct
  REGION 1..10: note = Description of sequence: TEAD1 L9F from Experiment 4 of Table 10
SVLENFTIFL

SEQ ID NO: 4226 - protein, 9 aa, synthetic construct
  REGION 1..9: note = Description of sequence: NSDHL A9V from Experiment 4 of Table 10
ILTGLNYEV

SEQ ID NO: 4227 - protein, 9 aa, synthetic construct
  REGION 1..9: note = Description of sequence: GANAB S5F from Experiment 4 of Table 10
ALYGFVPVL

SEQ ID NO: 4228 - protein, 9 aa, synthetic construct
  REGION 1..9: note = Description of sequence: FNDC3B L3M from Experiment 4 of Table 10
VVMSWAPPV

SEQ ID NO: 4229 - protein, 10 aa, synthetic construct
  REGION 1..10: note = Description of sequence: GCN1L1 L6P from Experiment 4 of Table 10
ALLETPSLLL

SEQ ID NO: 4230 - protein, 9 aa, synthetic construct
  REGION 1..9: note = Description of sequence: MLL2 L8H from Experiment 4 of Table 10
ALSPVIPHI

SEQ ID NO: 4231 - protein, 10 aa, synthetic construct
  REGION 1..10: note = Description of sequence: SMARCD3 H8Y from Experiment 4 of Table 10
KLFEFLVYGV

SEQ ID NO: 4232 - protein, 9 aa, synthetic construct
  REGION 1..9: note = Description of sequence: GNL3L R4C from Experiment 4 of Table 10
NLNCCSVPV

SEQ ID NO: 4233 - protein, 9 aa, synthetic construct
  REGION 1..9: note = Description of sequence: USP28 C5F from Experiment 4 of Table 10
LIIPFIHLI

SEQ ID NO: 4234 - protein, 9 aa, synthetic construct
  REGION 1..9: note = Description of sequence: MRM1 T6P from Experiment 4 of Table 10
LLFGMPPCL

SEQ ID NO: 4235 - protein, 9 aa, synthetic construct
  REGION 1..9: note = Description of sequence: SNX24 P6L from Experiment 4 of Table 10
KLSHQLVLL

SEQ ID NO: 4236 - protein, 9 aa, synthetic construct
  REGION 1..9: note = Description of sequence: PGM5 H5Y from Experiment 4 of Table 10
AVGSYVYSV

SEQ ID NO: 4237 - protein, 9 aa, synthetic construct
  REGION 1..9: note = Description of sequence: SEC24A P5L from Experiment 4 of Table 10
FLYNLLTRV

SEQ ID NO: 4238 - protein, 9 aa, synthetic construct
  REGION 1..9: note = Description of sequence: AKAP13 Q8K from Experiment 4 of Table 10
KLMNIQQKL

SEQ ID NO: 4239 - protein, 9 aa, synthetic construct
  REGION 1..9: note = Description of sequence: PABPC1 R5Q from Experiment 4 of Table 10
MLGEQLFPL

SEQ ID NO: 4240 - protein, 9 aa, synthetic construct
  REGION 1..9: note = Description of sequence: MAGE-A3 112-120 from Experiment 4 of Table 10
KVAELVHFL

SEQ ID NO: 4241 - protein, 9 aa, synthetic construct
  REGION 1..9: note = Description of sequence: MAGE-A12 112-120 from Experiment 4 of Table 10
KMAELVHFL

SEQ ID NO: 4242 - protein, 9 aa, synthetic construct
  REGION 1..9: note = Description of sequence: MAGE-A2 112-120 from Experiment 4 of Table 10
KMVELVHFL

SEQ ID NO: 4243 - protein, 9 aa, synthetic construct
  REGION 1..9: note = Description of sequence: MAGE-A6 112-120 from Experiment 4 of Table 10
KVAKLVHFL

SEQ ID NO: 4244 - protein, 9 aa, synthetic construct
  REGION 1..9: note = Description of sequence: A2ML1-YLD_K7R from Experiment 5 of Table 10
YLDELIRNT

SEQ ID NO: 4245 - protein, 9 aa, synthetic construct
  REGION 1..9: note = Description of sequence: AGFG2-FLQ_S4S from Experiment 5 of Table 10
FLQFRGNEV

SEQ ID NO: 4246 - protein, 9 aa, synthetic construct
  REGION 1..9: note = Description of sequence: AGXT2L2-ILT_M5I from Experiment 5 of Table 10
ILTDIEEKV

SEQ ID NO: 4247 - protein, 9 aa, synthetic construct
  REGION 1..9: note = Description of sequence: AHNAK-SMP_S1F from Experiment 5 of Table 10
FMPDFDLHL

SEQ ID NO: 4248 - protein, 9 aa, synthetic construct
  REGION 1..9: note = Description of sequence: AKAP13-KLM_Q8K from Experiment 5 of Table 10
KLMNIQQKL

SEQ ID NO: 4249 - protein, 9 aa, synthetic construct
  REGION 1..9: note = Description of sequence: APBB2-GML_L3F from Experiment 5 of Table 10
GMFPVDKPV

SEQ ID NO: 4250 - protein, 9 aa, synthetic construct
  REGION 1..9: note = Description of sequence: APBB2-VQY_L7F from Experiment 5 of Table 10
VQYLGMFPV

SEQ ID NO: 4251 - protein, 9 aa, synthetic construct
  REGION 1..9: note = Description of sequence: APCDD1L-RLP_R1W from Experiment 5 of Table 10
WLPHVEYEL

SEQ ID NO: 4252 - protein, 9 aa, synthetic construct
  REGION 1..9: note = Description of sequence: ATP6AP1-KLG_G3W from Experiment 5 of Table 10
KLWASPLHV

SEQ ID NO: 4253 - protein, 9 aa, synthetic construct
  REGION 1..9: note = Description of sequence: BAIAP3-ILN_V6I from Experiment 5 of Table 10
ILNVDIFTL

SEQ ID NO: 4254 - protein, 9 aa, synthetic construct
  REGION 1..9: note = Description of sequence: BCL9L-FVY_T6I from Experiment 5 of Table 10
FVYVFITHL

SEQ ID NO: 4255 - protein, 9 aa, synthetic construct
  REGION 1..9: note = Description of sequence: BTBD1-FML_LI from Experiment 5 of Table 10
FMLLTQARI

SEQ ID NO: 4256 - protein, 10 aa, synthetic construct
  REGION 1..10: note = Description of sequence: C15orf32-MLS_G9R from Experiment 5 of Table 10
MLSILALVRV

SEQ ID NO: 4257 - protein, 9 aa, synthetic construct
  REGION 1..9: note = Description of sequence: C17orf75-ALS_V7A from Experiment 5 of Table 10
ALSYTPAEV

SEQ ID NO: 4258 - protein, 10 aa, synthetic construct
  REGION 1..10: note = Description of sequence: C1S-10_N1H from Experiment 5 of Table 10
HLMDGDLGLI

SEQ ID NO: 4259 - protein, 9 aa, synthetic construct
  REGION 1..9: note = Description of sequence: C1S-9_N1H from Experiment 5 of Table 10
HLMDGDLGL

SEQ ID NO: 4260 - protein, 9 aa, synthetic construct
  REGION 1..9: note = Description of sequence: C3orf58-LMV_L4P from Experiment 5 of Table 10
LMVPHSPSL

SEQ ID NO: 4261 - protein, 9 aa, synthetic construct
  REGION 1..9: note = Description of sequence: CAMK1D-KLF_K8N from Experiment 5 of Table 10
KLFEQILNA

SEQ ID NO: 4262 - protein, 9 aa, synthetic construct
  REGION 1..9: note = Description of sequence: CCM2-YML_R6H from Experiment 5 of Table 10
YMLTLHTKL

SEQ ID NO: 4263 - protein, 9 aa, synthetic construct
  REGION 1..9: note = Description of sequence: CD47-GLT_V6F from Experiment 5 of Table 10
GLTSFFIAI

SEQ ID NO: 4264 - protein, 9 aa, synthetic construct
  REGION 1..9: note = Description of sequence: CDC37L1-FLS_P6L from Experiment 5 of Table 10
FLSDHLYLV

SEQ ID NO: 4265 - protein, 9 aa, synthetic construct
  REGION 1..9: note = Description of sequence: CELSR1-YLF_F3L from Experiment 5 of Table 10
YLLAIFSGL

SEQ ID NO: 4266 - protein, 9 aa, synthetic construct
  REGION 1..9: note = Description of sequence: CHD8-KLN_P7A from Experiment 5 of Table 10
KLNTITAVV

SEQ ID NO: 4267 - protein, 9 aa, synthetic construct
  REGION 1..9: note = Description of sequence: CHST13-VLV_V1M from Experiment 5 of Table 10
MLVDDAHGL

SEQ ID NO: 4268 - protein, 9 aa, synthetic construct
  REGION 1..9: note = Description of sequence: CHST14-MLM_F4L from Experiment 5 of Table 10
MLMLAVIVA

SEQ ID NO: 4269 - protein, 9 aa, synthetic construct
  REGION 1..9: note = Description of sequence: CLCN4-LLA_G8V from Experiment 5 of Table 10
LLAGTLAVV

SEQ ID NO: 4270 - protein, 9 aa, synthetic construct
  REGION 1..9: note = Description of sequence: CNKSR1-SLA_A9V from Experiment 5 of Table 10
SLAPLSPRV

SEQ ID NO: 4271 - protein, 10 aa, synthetic construct
  REGION 1..10: note = Description of sequence: COL18A1-VLL_S8F from Experiment 5 of Table 10
VLLGVKLFGV

SEQ ID NO: 4272 - protein, 9 aa, synthetic construct
  REGION 1..9: note = Description of sequence: DCHS1-TLF_I5M from Experiment 5 of Table 10
TLFTMVGTV

SEQ ID NO: 4273 - protein, 9 aa, synthetic construct
  REGION 1..9: note = Description of sequence: DHX33-LLA_K5T from Experiment 5 of Table 10
LLAMTVPNV

SEQ ID NO: 4274 - protein, 9 aa, synthetic construct
  REGION 1..9: note = Description of sequence: DHX33-LLA_M4I from Experiment 5 of Table 10
LLAIKVPNV

SEQ ID NO: 4275 - protein, 10 aa, synthetic construct
  REGION 1..10: note = Description of sequence: DNAH8-FMT_G7D from Experiment 5 of Table 10
FMTKINDLEV

SEQ ID NO: 4276 - protein, 9 aa, synthetic construct
  REGION 1..9: note = Description of sequence: DOCK7-FLN_M9L from Experiment 5 of Table 10
FLNDLLSVL

SEQ ID NO: 4277 - protein, 9 aa, synthetic construct
  REGION 1..9: note = Description of sequence: DOLPP1-GLM_A4V from Experiment 5 of Table 10
GLMVIAWFI

SEQ ID NO: 4278 - protein, 9 aa, synthetic construct
  REGION 1..9: note = Description of sequence: DRAM1-FII_I3F from Experiment 5 of Table 10
FIFSYVVAV

SEQ ID NO: 4279 - protein, 9 aa, synthetic construct
  REGION 1..9: note = Description of sequence: ERBB2-ALI_H8Y from Experiment 5 of Table 10
ALIHHNTYL

SEQ ID NO: 4280 - protein, 9 aa, synthetic construct
  REGION 1..9: note = Description of sequence: EXOC3L4-ILL_V9I from Experiment 5 of Table 10
ILLDWAANI

SEQ ID NO: 4281 - protein, 9 aa, synthetic construct
  REGION 1..9: note = Description of sequence: FAM47B-ALF_A1S from Experiment 5 of Table 10
SLFSELSPV

SEQ ID NO: 4282 - protein, 9 aa, synthetic construct
  REGION 1..9: note = Description of sequence: FBXL4-SLL_L2V from Experiment 5 of Table 10
SVLEYYTEL

SEQ ID NO: 4283 - protein, 9 aa, synthetic construct
  REGION 1..9: note = Description of sequence: FLNA-HIA_P6L from Experiment 5 of Table 10
HIAKSLFEV

SEQ ID NO: 4284 - protein, 9 aa, synthetic construct
  REGION 1..9: note = Description of sequence: FNDC3B-VVL_L3M from Experiment 5 of Table 10
VVMSWAPPV

SEQ ID NO: 4285 - protein, 9 aa, synthetic construct
  REGION 1..9: note = Description of sequence: GABRG3-TAM_L5I from Experiment 5 of Table 10
TAMDIFVTV

SEQ ID NO: 4286 - protein, 9 aa, synthetic construct
  REGION 1..9: note = Description of sequence: GABRG3-YVT_L7I from Experiment 5 of Table 10
YVTAMDIFV

SEQ ID NO: 4287 - protein, 9 aa, synthetic construct
  REGION 1..9: note = Description of sequence: GALC-YVV_V3L from Experiment 5 of Table 10
YVLTWIVGA

SEQ ID NO: 4288 - protein, 9 aa, synthetic construct
  REGION 1..9: note = Description of sequence: GANAB-ALY_S5F from Experiment 5 of Table 10
ALYGFVPVL

SEQ ID NO: 4289 - protein, 10 aa, synthetic construct
  REGION 1..10: note = Description of sequence: GCN1L1-10_L6P from Experiment 5 of Table 10
ALLETPSLLL

SEQ ID NO: 4290 - protein, 9 aa, synthetic construct
  REGION 1..9: note = Description of sequence: GCN1L1-9_L6P from Experiment 5 of Table 10
ALLETPSLL

SEQ ID NO: 4291 - protein, 9 aa, synthetic construct
  REGION 1..9: note = Description of sequence: GLRA1-LIF_F6L from Experiment 5 of Table 10
LIFNMLYWI

SEQ ID NO: 4292 - protein, 9 aa, synthetic construct
  REGION 1..9: note = Description of sequence: GOLGA3-SLD_P4L from Experiment 5 of Table 10
SLDLTTSPV

SEQ ID NO: 4293 - protein, 9 aa, synthetic construct
  REGION 1..9: note = Description of sequence: GPR137B-KMS_S3P from Experiment 5 of Table 10
KMPLANIYL

SEQ ID NO: 4294 - protein, 9 aa, synthetic construct
  REGION 1..9: note = Description of sequence: GPR174-FSF_P4S from Experiment 5 of Table 10
FSFSLDFLV

SEQ ID NO: 4295 - protein, 9 aa, synthetic construct
  REGION 1..9: note = Description of sequence: GSTA4-FLQ_E4K from Experiment 5 of Table 10
FLQKYTVKL

SEQ ID NO: 4296 - protein, 9 aa, synthetic construct
  REGION 1..9: note = Description of sequence: HAUS3-ILN_T7A from Experiment 5 of Table 10
ILNAMIAKI

SEQ ID NO: 4297 - protein, 9 aa, synthetic construct
  REGION 1..9: note = Description of sequence: HBZ-KLS_A7T from Experiment 5 of Table 10
KLSELHTYI

SEQ ID NO: 4298 - protein, 9 aa, synthetic construct
  REGION 1..9: note = Description of sequence: HERC1-SLL_PS from Experiment 5 of Table 10
SLLLLSVSV

SEQ ID NO: 4299 - protein, 9 aa, synthetic construct
  REGION 1..9: note = Description of sequence: HLA-DRB5-YMA_KE from Experiment 5 of Table 10
YMAELTVTL

SEQ ID NO: 4300 - protein, 9 aa, synthetic construct
  REGION 1..9: note = Description of sequence: HOXC9-YMY_G4D from Experiment 5 of Table 10
YMYDSPGEL

SEQ ID NO: 4301 - protein, 10 aa, synthetic construct
  REGION 1..10: note = Description of sequence: HTR1F-10_V1M from Experiment 5 of Table 10
MMPFSIVYIV

SEQ ID NO: 4302 - protein, 9 aa, synthetic construct
  REGION 1..9: note = Description of sequence: HTR1F-9_V1M from Experiment 5 of Table 10
MMPFSIVYI

SEQ ID NO: 4303 - protein, 10 aa, synthetic construct
  REGION 1..10: note = Description of sequence: HTR1F-LVM_V2M from Experiment 5 of Table 10
LMMPFSIVYI

SEQ ID NO: 4304 - protein, 10 aa, synthetic construct
  REGION 1..10: note = Description of sequence: IGF1-TMS_S4F from Experiment 5 of Table 10
TMSFSHLFYL

SEQ ID NO: 4305 - protein, 9 aa, synthetic construct
  REGION 1..9: note = Description of sequence: IL17RA-FIT_TM from Experiment 5 of Table 10
FIMGISILL

SEQ ID NO: 4306 - protein, 9 aa, synthetic construct
  REGION 1..9: note = Description of sequence: INTS1-VLL_L3F from Experiment 5 of Table 10
VLFHRAFLV

SEQ ID NO: 4307 - protein, 9 aa, synthetic construct
  REGION 1..9: note = Description of sequence: IPO9-FSS_E4D from Experiment 5 of Table 10
FSSDVLNLV

SEQ ID NO: 4308 - protein, 9 aa, synthetic construct
  REGION 1..9: note = Description of sequence: ITIH6-RLG_G3V from Experiment 5 of Table 10
RLVPYLEFL

SEQ ID NO: 4309 - protein, 9 aa, synthetic construct
  REGION 1..9: note = Description of sequence: KAT6A-KLS_MK from Experiment 5 of Table 10
KLSREIKPV

SEQ ID NO: 4310 - protein, 9 aa, synthetic construct
  REGION 1..9: note = Description of sequence: KCNB2-LLA_P6T from Experiment 5 of Table 10
LLAILTYYV

SEQ ID NO: 4311 - protein, 9 aa, synthetic construct
  REGION 1..9: note = Description of sequence: KCNC3-FLP_A7V from Experiment 5 of Table 10
FLPDLNVNA

SEQ ID NO: 4312 - protein, 9 aa, synthetic construct
  REGION 1..9: note = Description of sequence: KIF20B-YTS_S6L from Experiment 5 of Table 10
YTSEILSPI

SEQ ID NO: 4313 - protein, 9 aa, synthetic construct
  REGION 1..9: note = Description of sequence: LCP1-NLF_PL from Experiment 5 of Table 10
NLFNRYLAL

SEQ ID NO: 4314 - protein, 10 aa, synthetic construct
  REGION 1..10: note = Description of sequence: MAR11-10_F1L from Experiment 5 of Table 10
LLIASVTWLL

SEQ ID NO: 4315 - protein, 9 aa, synthetic construct
  REGION 1..9: note = Description of sequence: MAR11-9_F1L from Experiment 5 of Table 10
LLIASVTWL

SEQ ID NO: 4316 - protein, 9 aa, synthetic construct
  REGION 1..9: note = Description of sequence: ME1-FLD_A8G from Experiment 5 of Table 10
FLDEFMEGV

SEQ ID NO: 4317 - protein, 9 aa, synthetic construct
  REGION 1..9: note = Description of sequence: MLL2-ALS_L8H from Experiment 5 of Table 10
ALSPVIPHI

SEQ ID NO: 4318 - protein, 9 aa, synthetic construct
  REGION 1..9: note = Description of sequence: MPV17-YLW_A5P from Experiment 5 of Table 10
YLWPPVQLA

SEQ ID NO: 4319 - protein, 9 aa, synthetic construct
  REGION 1..9: note = Description of sequence: MRGPRF-RLW_R1W from Experiment 5 of Table 10
WLWEPLRVV

SEQ ID NO: 4320 - protein, 10 aa, synthetic construct
  REGION 1..10: note = Description of sequence: MRM1-10_T6P from Experiment 5 of Table 10
LLFGMPPCLL

SEQ ID NO: 4321 - protein, 9 aa, synthetic construct
  REGION 1..9: note = Description of sequence: MRM1-9_T6P from Experiment 5 of Table 10
LLFGMPPCL

SEQ ID NO: 4322 - protein, 9 aa, synthetic construct
  REGION 1..9: note = Description of sequence: MYH4-GLD_D3N from Experiment 5 of Table 10
GLNETIAKL

SEQ ID NO: 4323 - protein, 9 aa, synthetic construct
  REGION 1..9: note = Description of sequence: MYPN-RVI_R1L from Experiment 5 of Table 10
LVIGMPPPV

SEQ ID NO: 4324 - protein, 9 aa, synthetic construct
  REGION 1..9: note = Description of sequence: NBPF24-LLD_E6G from Experiment 5 of Table 10
LLDEKGPEV

SEQ ID NO: 4325 - protein, 9 aa, synthetic construct
  REGION 1..9: note = Description of sequence: NOS1-FID_D3Y from Experiment 5 of Table 10
FIYQYYSSI

SEQ ID NO: 4326 - protein, 9 aa, synthetic construct
  REGION 1..9: note = Description of sequence: NSDHL-ILT_A9V from Experiment 5 of Table 10
ILTGLNYEV

SEQ ID NO: 4327 - protein, 9 aa, synthetic construct
  REGION 1..9: note = Description of sequence: OASL-ILD_DN from Experiment 5 of Table 10
ILNPADPTL

SEQ ID NO: 4328 - protein, 9 aa, synthetic construct
  REGION 1..9: note = Description of sequence: OR10A3-ILI_V6F from Experiment 5 of Table 10
ILIVMFPFL

SEQ ID NO: 4329 - protein, 9 aa, synthetic construct
  REGION 1..9: note = Description of sequence: OR14C36-FML_V6L from Experiment 5 of Table 10
FMLYLLTLM

SEQ ID NO: 4330 - protein, 9 aa, synthetic construct
  REGION 1..9: note = Description of sequence: OR1G1-FLF_T8M from Experiment 5 of Table 10
FLFMYLVMV

SEQ ID NO: 4331 - protein, 9 aa, synthetic construct
  REGION 1..9: note = Description of sequence: OR2T1-FLN_F5L from Experiment 5 of Table 10
FLNVLFPLL

SEQ ID NO: 4332 - protein, 9 aa, synthetic construct
  REGION 1..9: note = Description of sequence: OR5K2-YIF_GE from Experiment 5 of Table 10
YIFLENLAL

SEQ ID NO: 4333 - protein, 9 aa, synthetic construct
  REGION 1..9: note = Description of sequence: OR5M3-KMV_T8N from Experiment 5 of Table 10
KMVAVFYNT

SEQ ID NO: 4334 - protein, 9 aa, synthetic construct
  REGION 1..9: note = Description of sequence: OR6F1-VLN_T8M from Experiment 5 of Table 10
VLNPFIYML

SEQ ID NO: 4335 - protein, 9 aa, synthetic construct
  REGION 1..9: note = Description of sequence: OR8B8-YVN_V2L from Experiment 5 of Table 10
YLNELVVFV

SEQ ID NO: 4336 - protein, 10 aa, synthetic construct
  REGION 1..10: note = Description of sequence: OR8D4-10_G3E from Experiment 5 of Table 10
FLEIYTVTVV

SEQ ID NO: 4337 - protein, 9 aa, synthetic construct
  REGION 1..9: note = Description of sequence: OR8D4-9_G3E from Experiment 5 of Table 10
FLEIYTVTV

SEQ ID NO: 4338 - protein, 9 aa, synthetic construct
  REGION 1..9: note = Description of sequence: OR9Q2-FLF_S8F from Experiment 5 of Table 10
FLFTFFAFI

SEQ ID NO: 4339 - protein, 9 aa, synthetic construct
  REGION 1..9: note = Description of sequence: OR9Q2-SID_S1F from Experiment 5 of Table 10
FIDCYLLAI

SEQ ID NO: 4340 - protein, 9 aa, synthetic construct
  REGION 1..9: note = Description of sequence: OVOL1-SLL_L9V from Experiment 5 of Table 10
SLLQGSPHV

SEQ ID NO: 4341 - protein, 9 aa, synthetic construct
  REGION 1..9: note = Description of sequence: PABPC1-MLG_R5Q from Experiment 5 of Table 10
MLGEQLFPL

SEQ ID NO: 4342 - protein, 9 aa, synthetic construct
  REGION 1..9: note = Description of sequence: PCDHB3-FLF_SL from Experiment 5 of Table 10
FLFLVLLFV

SEQ ID NO: 4343 - protein, 9 aa, synthetic construct
  REGION 1..9: note = Description of sequence: PELP1-LVL_L3F from Experiment 5 of Table 10
LVFPLVMGV

SEQ ID NO: 4344 - protein, 9 aa, synthetic construct
  REGION 1..9: note = Description of sequence: PELP1-RLH_L7F from Experiment 5 of Table 10
RLHDLVFPL

SEQ ID NO: 4345 - protein, 9 aa, synthetic construct
  REGION 1..9: note = Description of sequence: PGM5-AVG_H5Y from Experiment 5 of Table 10
AVGSYVYSV

SEQ ID NO: 4346 - protein, 9 aa, synthetic construct
  REGION 1..9: note = Description of sequence: PHKA2-LLS_SF from Experiment 5 of Table 10
LLSIIFFPA

SEQ ID NO: 4347 - protein, 9 aa, synthetic construct
  REGION 1..9: note = Description of sequence: PIGN-FLT_P7H from Experiment 5 of Table 10
FLTVFSHFM

SEQ ID NO: 4348 - protein, 9 aa, synthetic construct
  REGION 1..9: note = Description of sequence: PLXNB1-VLF_V1L from Experiment 5 of Table 10
LLFAAFSSA

SEQ ID NO: 4349 - protein, 9 aa, synthetic construct
  REGION 1..9: note = Description of sequence: PRSS16-LLL_L1Q from Experiment 5 of Table 10
QLLVSLWGL

SEQ ID NO: 4350 - protein, 9 aa, synthetic construct
  REGION 1..9: note = Description of sequence: PTCHD4-HQL_G5V from Experiment 5 of Table 10
HQLGVVVEV

SEQ ID NO: 4351 - protein, 9 aa, synthetic construct
  REGION 1..9: note = Description of sequence: PXDNL-SIL_S1F from Experiment 5 of Table 10
FILDAVQRV

SEQ ID NO: 4352 - protein, 9 aa, synthetic construct
  REGION 1..9: note = Description of sequence: REV3L-KLS_R6H from Experiment 5 of Table 10
KLSEYHNSL

SEQ ID NO: 4353 - protein, 10 aa, synthetic construct
  REGION 1..10: note = Description of sequence: RRP1B-LLA_L7F from Experiment 5 of Table 10
LLADQNFKFI

SEQ ID NO: 4354 - protein, 9 aa, synthetic construct
  REGION 1..9: note = Description of sequence: RYR3-VLN_E6K from Experiment 5 of Table 10
VLNYFKPYL

SEQ ID NO: 4355 - protein, 9 aa, synthetic construct
  REGION 1..9: note = Description of sequence: SCN3A-ALV_P7S from Experiment 5 of Table 10
ALVGAISSI

SEQ ID NO: 4356 - protein, 9 aa, synthetic construct
  REGION 1..9: note = Description of sequence: SEC24A-FLY_P5L from Experiment 5 of Table 10
FLYNLLTRV

SEQ ID NO: 4357 - protein, 9 aa, synthetic construct
  REGION 1..9: note = Description of sequence: SH3RF2-HMV_MI from Experiment 5 of Table 10
HIVEISTPV

SEQ ID NO: 4358 - protein, 9 aa, synthetic construct
  REGION 1..9: note = Description of sequence: SHROOM2-KLL_D6V from Experiment 5 of Table 10
KLLAGVEIV

SEQ ID NO: 4359 - protein, 10 aa, synthetic construct
  REGION 1..10: note = Description of sequence: SLC15A2-ILG_G4E from Experiment 5 of Table 10
ILGEQVVHTV

SEQ ID NO: 4360 - protein, 9 aa, synthetic construct
  REGION 1..9: note = Description of sequence: SLC16A7-AMA_P6L from Experiment 5 of Table 10
AMAGSLVFL

SEQ ID NO: 4361 - protein, 9 aa, synthetic construct
  REGION 1..9: note = Description of sequence: SLC1A2-YMS_S3P from Experiment 5 of Table 10
YMPTTIIAA

SEQ ID NO: 4362 - protein, 9 aa, synthetic construct
  REGION 1..9: note = Description of sequence: SLC2A3-ILV_L9M from Experiment 5 of Table 10
ILVAQIFGM

SEQ ID NO: 4363 - protein, 9 aa, synthetic construct
  REGION 1..9: note = Description of sequence: SLC2A4-ILI_A4T from Experiment 5 of Table 10
ILITQVLGL

SEQ ID NO: 4364 - protein, 10 aa, synthetic construct
  REGION 1..10: note = Description of sequence: SLC38A1-RIW_W3L from Experiment 5 of Table 10
RILAALFLGL

SEQ ID NO: 4365 - protein, 9 aa, synthetic construct
  REGION 1..9: note = Description of sequence: SLC39A4-LLG_G4S from Experiment 5 of Table 10
LLGSWTVLL

SEQ ID NO: 4366 - protein, 10 aa, synthetic construct
  REGION 1..10: note = Description of sequence: SMARCD3-KLF_H8Y from Experiment 5 of Table 10
KLFEFLVYGV

SEQ ID NO: 4367 - protein, 9 aa, synthetic construct
  REGION 1..9: note = Description of sequence: SMOX-KLA_KN from Experiment 5 of Table 10
KLANPLPYT

SEQ ID NO: 4368 - protein, 9 aa, synthetic construct
  REGION 1..9: note = Description of sequence: SNX24-KLS_P6L from Experiment 5 of Table 10
KLSHQLVLL

SEQ ID NO: 4369 - protein, 9 aa, synthetic construct
  REGION 1..9: note = Description of sequence: SPOPN147I-FLL_N7I from Experiment 5 of Table 10
FLLDEAIGL

SEQ ID NO: 4370 - protein, 9 aa, synthetic construct
  REGION 1..9: note = Description of sequence: SREBF1-YLQ_L6M from Experiment 5 of Table 10
YLQDSMATT

SEQ ID NO: 4371 - protein, 10 aa, synthetic construct
  REGION 1..10: note = Description of sequence: SSPN-10_S9F from Experiment 5 of Table 10
FLMASISSFL

SEQ ID NO: 4372 - protein, 9 aa, synthetic construct
  REGION 1..9: note = Description of sequence: SSPN-9_S9F from Experiment 5 of Table 10
FLMASISSF

SEQ ID NO: 4373 - protein, 9 aa, synthetic construct
  REGION 1..9: note = Description of sequence: SSPN-LMA_S8F from Experiment 5 of Table 10
LMASISSFL

SEQ ID NO: 4374 - protein, 9 aa, synthetic construct
  REGION 1..9: note = Description of sequence: ST6GALNAC2-LLF_Y6H from Experiment 5 of Table 10
LLFALHFSA

SEQ ID NO: 4375 - protein, 9 aa, synthetic construct
  REGION 1..9: note = Description of sequence: STOX1-RLM_M3I from Experiment 5 of Table 10
RLIKHYPGI

SEQ ID NO: 4376 - protein, 9 aa, synthetic construct
  REGION 1..9: note = Description of sequence: TAS1R2-FMS_A4S from Experiment 5 of Table 10
FMSSYSGVL

SEQ ID NO: 4377 - protein, 9 aa, synthetic construct
  REGION 1..9: note = Description of sequence: TBX3-GMG_T8M from Experiment 5 of Table 10
GMGPLLAMV

SEQ ID NO: 4378 - protein, 10 aa, synthetic construct
  REGION 1..10: note = Description of sequence: TEAD1-SVL_L9F from Experiment 5 of Table 10
SVLENFTIFL

SEQ ID NO: 4379 - protein, 10 aa, synthetic construct
  REGION 1..10: note = Description of sequence: TEAD1-VLE_L8F from Experiment 5 of Table 10
VLENFTIFLV

SEQ ID NO: 4380 - protein, 9 aa, synthetic construct
  REGION 1..9: note = Description of sequence: TEX2-FLM_K8N from Experiment 5 of Table 10
FLMTLETNM

SEQ ID NO: 4381 - protein, 10 aa, synthetic construct
  REGION 1..10: note = Description of sequence: TMEM127-VTF_L9V from Experiment 5 of Table 10
VTFAVSFYVV

SEQ ID NO: 4382 - protein, 9 aa, synthetic construct
  REGION 1..9: note = Description of sequence: TMEM195-ALS_S3L from Experiment 5 of Table 10
ALLQVTLLL

SEQ ID NO: 4383 - protein, 9 aa, synthetic construct
  REGION 1..9: note = Description of sequence: TP73-YTP_P3S from Experiment 5 of Table 10
YTSEHAASV

SEQ ID NO: 4384 - protein, 9 aa, synthetic construct
  REGION 1..9: note = Description of sequence: TPP2-SLA_WL from Experiment 5 of Table 10
SLAETFLET

SEQ ID NO: 4385 - protein, 9 aa, synthetic construct
  REGION 1..9: note = Description of sequence: TRIM16-RMA_R1T from Experiment 5 of Table 10
TMAAISNTV

SEQ ID NO: 4386 - protein, 9 aa, synthetic construct
  REGION 1..9: note = Description of sequence: TRIM58-VLA_V1F from Experiment 5 of Table 10
FLASPSVPL

SEQ ID NO: 4387 - protein, 9 aa, synthetic construct
  REGION 1..9: note = Description of sequence: TRIM58-YMV_V3F from Experiment 5 of Table 10
YMFLASPSV

SEQ ID NO: 4388 - protein, 9 aa, synthetic construct
  REGION 1..9: note = Description of sequence: TRPC1-MLL_Q5H from Experiment 5 of Table 10
MLLKHDVSL

SEQ ID NO: 4389 - protein, 9 aa, synthetic construct
  REGION 1..9: note = Description of sequence: TRPV3-LLL_A8V from Experiment 5 of Table 10
LLLNMLIVL

SEQ ID NO: 4390 - protein, 9 aa, synthetic construct
  REGION 1..9: note = Description of sequence: TRPV4-FMI_A6T from Experiment 5 of Table 10
FMIGYTSAL

SEQ ID NO: 4391 - protein, 9 aa, synthetic construct
  REGION 1..9: note = Description of sequence: TRPV4-YLL_A9T from Experiment 5 of Table 10
YLLFMIGYT

SEQ ID NO: 4392 - protein, 9 aa, synthetic construct
  REGION 1..9: note = Description of sequence: TTLL12-KLP_N7D from Experiment 5 of Table 10
KLPLDIDPV

SEQ ID NO: 4393 - protein, 9 aa, synthetic construct
  REGION 1..9: note = Description of sequence: UNC13A-SQL_S1F from Experiment 5 of Table 10
FQLNQSFEI

SEQ ID NO: 4394 - protein, 9 aa, synthetic construct
  REGION 1..9: note = Description of sequence: USP28-LII_C5F from Experiment 5 of Table 10
LIIPFIHLI

SEQ ID NO: 4395 - protein, 9 aa, synthetic construct
  REGION 1..9: note = Description of sequence: VN1R2-LML_L3F from Experiment 5 of Table 10
LMFWASSSI

SEQ ID NO: 4396 - protein, 9 aa, synthetic construct
  REGION 1..9: note = Description of sequence: VN1R5-MII_S7Y from Experiment 5 of Table 10
MIISHLYLI

SEQ ID NO: 4397 - protein, 9 aa, synthetic construct
  REGION 1..9: note = Description of sequence: WDR46-FLT_T3I from Experiment 5 of Table 10
FLIYLDVSV

SEQ ID NO: 4398 - protein, 9 aa, synthetic construct
  REGION 1..9: note = Description of sequence: ZDHHC17-LLL_T4I from Experiment 5 of Table 10
LLLIFNVSV

SEQ ID NO: 4399 - protein, 9 aa, synthetic construct
  REGION 1..9: note = Description of sequence: ZDHHC7-SLL_P7L from Experiment 5 of Table 10
SLLWMNLFV

SEQ ID NO: 4400 - protein, 9 aa, synthetic construct
  REGION 1..9: note = Description of sequence: ZFP90-FTQ_EK from Experiment 5 of Table 10
FTQEKWYHV

SEQ ID NO: 4401 - protein, 9 aa, synthetic construct
  REGION 1..9: note = Description of sequence: ZNF827-NLF_S4I from Experiment 5 of Table 10
NLFIQDISV

SEQ ID NO: 4402 - protein, 10 aa, synthetic construct
  REGION 1..10: note = Description of sequence: HCV-KLV (PE) from Experiment 5 of Table 10
KLVALGINAV

SEQ ID NO: 4403 - protein, 10 aa, synthetic construct
  REGION 1..10: note = Description of sequence: HCV-KLV (APC) from Experiment 5 of Table 10
KLVALGINAV

SEQ ID NO: 4404-4405 - skipped (2 entries)
